(19) United States
(12) Patent Application Publication
(10) Pub. No.: US 2019/0330659 A1
(43) Pub. Date: Oct. 31, 2019

(54) SCARLESS DNA ASSEMBLY AND GENOME EDITING USING CRISPR/CPF1 AND DNA LIGASE

(71) Applicant: Zymergen Inc., Emeryville, CA (US)

(72) Inventors: William C. DeLoache, Oakland, CA (US); Hendrik Marinus van Rossum, Oakland, CA (US); Kedar Gautam Patel, Fremont, CA (US)

(21) Appl. No.: 16/310,895

(22) PCT Filed: Jul. 14, 2017
(86) PCT No.: PCT/US2017/042245

§ 371 Date: Dec. 18, 2018

Related U.S. Application Data
(60) Provisional application No. 62/362,909, filed on Jul. 15, 2016.

(51) Int. Cl. C12N 15/90; C12N 15/66; C12N 15/113; C12N 15/10; C12N 9/00

(52) U.S. Cl. CPC C12N 15/902; C12N 15/66; C12N 15/113; C12Q 2521/301; C12N 9/93; C12N 2310/20; C12N 15/1031

(57) ABSTRACT

The disclosure describes a scarless DNA assembly and genome editing methodology termed “CLIC” (CRISPR and Ligase Cloning), which utilizes a CRISPR/Cpf1 complex and DNA ligase to perform programmable gene editing and nucleotide assembly. The CLIC process is highly amenable to applications in vitro for the scarless assembly of a plurality of DNA parts simultaneously or in vivo for the site-specific insertion of one or more DNA molecules into the host genome.

### CROSS-REFERENCE TO RELATED APPLICATIONS

[0001] This application claims the benefit of priority to U.S. provisional application No. 62/362,909 filed on Jul., 15 2016, which is hereby incorporated by reference in its entirety, including all descriptions, references, figures, and claims for all purposes.

### FIELD

[0002] The present disclosure generally relates to systems, methods, and compositions used for guided genetic sequence editing in vivo and in vitro. The disclosure describes, inter alia, methods of using guided sequence editing complexes for improved DNA cloning, assembly of oligonucleotides, and for the improvement of microorganisms.

### DESCRIPTION OF THE TEXT FILE SUBMITTED ELECTRONICALLY

[0003] The contents of the text file submitted electronically herewith are incorporated herein by reference in their entirety: A computer readable format copy of the Sequence Listing (filename: ZYMR_002_01WO_SeqList_ST25.txt, date recorded: Jul. 14, 2017; file size: 797 kilobytes).

### BACKGROUND

[0004] A major area of interest in biology is the in vivo and in vitro targeted editing of genetic sequences. Clustered regularly interspaced short palindromic repeats (CRISPR) systems are a new class of genome-editing tools capable of targeting and modifying selected target DNA loci.

[0005] CRISPR editing begins with a double stranded DNA break catalyzed by the CRISPR complex that triggers a cell's homology-directed repair (HDR) mechanisms. Modern gene editing techniques exploit the HDR process to knock in replacement DNA sections with desired sequence modifications.

[0006] Unfortunately, the success rate of HDR from traditional CRISPR systems remains extremely low. Moreover, HDR failures often result in non-homologous end-joining at the site of the DNA break, which can inadvertently result in frameshift mutations, and loss of function of the targeted allele. Finally, CRISPR editing function requires the presence of homologous recombination machinery that is not available for conducting in vitro cloning reactions, or in vivo reactions in organisms lacking homologous recombination genes.

[0007] Thus, there is a need for improved compositions and methods for targeted alteration of genetic sequences.

### SUMMARY OF THE DISCLOSURE

[0008] In some embodiments, the present disclosure teaches methods, compositions, and kits for scarless “single pot” in vivo and in vitro DNA assembly reactions. Thus in some embodiments, the present disclosure teaches methods of digesting DNA with endonucleases. In some embodiments, the present disclosure teaches digesting DNA with CRISPR endonucleases. In some embodiments, the present disclosure teaches digesting DNA with Type V-class 2 CRISPR endonucleases. In some embodiments, the present disclosure teaches digesting DNA with Cpf1 endonucleases.

[0009] In some embodiments, the present disclosure teaches a CRISPR and Ligase Cloning method (termed “CLIC”). In some embodiments, the present disclosure teaches that CLIC is a method for DNA assembly that relies on the CRISPR nuclease Cpf1 to digest DNA molecules, leaving behind three to five base-pair sticky ends whose sequence can be controlled through the design of crRNA guide sequences (e.g., by designing the location of the Cpf1 cut). In some embodiments, these sticky ends are then annealed and ligated together with a DNA ligase in order to join two or more digested fragments into a fully assembled construct or genome without the addition of any genetic scars.

[0010] In some embodiments, the present disclosure teaches “single pot” one-reaction DNA assembly reactions that do not require inactivation of the endonuclease. In some embodiments, the methods of the present disclosure can be applied to multi-fragment assembly reactions. In some embodiments, the CLIC methods of the present disclosure capitalizes on the properties of class 2 CRISPR endonucleases, which cleave DNA at a location outside of their binding site. Thus, in some embodiments, the present disclosure teaches targeting class 2 CRISPR endonuclease target sites to locations of DNA that will be removed during the DNA assembly process, such that digested DNA regions cease to be substrates for the endonuclease. The present disclosure teaches that digested DNA fragments of the present invention can therefore be annealed and ligated to other DNA fragments in the same reaction as the CRISPR class 2 endonuclease cutting.

[0011] For example, in some embodiments, the present disclosure teaches a method for assembling gene constructs in vitro from a plurality of DNA fragments, said method comprising the steps of: (a) providing a plurality of DNA fragments comprising a first and second DNA fragment, wherein said first DNA fragment comprises a sequence overlap of at least three nucleic acids anywhere within the second DNA fragment; (b) digesting the first DNA fragment with a Cpf1 CRISPR system, thereby creating a sticky DNA end at the 5′ and/or 3′ of said first DNA fragment, wherein said digested first DNA fragment ceases to be a target for said Cpf1 CRISPR system; (c) annealing the sticky end of the digested first DNA fragment from step (b) to a second compatible sticky end on the second DNA fragment; and (d) ligating the annealed DNA fragments from step (c) together; wherein the resulting annealed product is an assembled construct.

[0012] The methods of the present disclosure are in some embodiments not limited to the assembly of only two DNA fragments. The present disclosure teaches methods for assembling multiple fragments. The methods of the present disclosure also provide users control of the order and directionality in which fragments are assembled. In some embodiments, the present disclosure teaches that the sticky ends created by the endonuclease digestions can be targeted to regions to create sticky ends that are only compatible when combined in a selected order and direction. See FIG. 5 for an illustration of one such embodiment of the present disclosure.

[0013] In some embodiments, the present disclosure teaches the use of crRNA with programmable guide sequences, which allow users to target to any sequence in the proximity of a compatible PAM. Thus the methods of the present invention, in some embodiments, do not require the introduction of restriction enzymes binding sites into DNA assembly reactions.

[0014] Thus in some embodiments, the present disclosure teaches a method of for assembling gene constructs, wherein no genetic scars are introduced into the assembled construct from practicing the method.

[0015] In some embodiments, the Cpf1 CRISPR systems of the present disclosure comprise i) a Cpf1 endonuclease, and ii) a crRNA capable of directing sequence-specific binding of the Cpf1 endonuclease to the first DNA fragment.

[0016] In other embodiments, the present disclosure teaches methods of expressing the components of Cpf1 CRISPR systems in vivo and in vitro. For example, in some embodiments, the present disclosure teaches cell-free expression systems for Cpf1 endonucleases from encoding polynucleotides. In other embodiments, the present disclosure teaches cell-free transcription, such as commercial DNA-dependent RNA polymerases for the production of crRNAs.

[0017] In some embodiments, the Cpf1 endonucleases of the present disclosure are naturally occurring (e.g., they are encoded by polynucleotides found in wild type organisms). In other embodiments, the Cpf1 endonucleases of the present disclosure are non-naturally occurring.

[0018] For example, in some embodiments, the present disclosure teaches codon-optimized Cpf1 endonucleases. In other embodiments, the present disclosure teaches engineered Cpf1 endonucleases. Thus in some embodiments, the present disclosure teach Cpf1 endonucleases with Nuclear Localization Signals. In some embodiments, the present disclosure teaches Cpf1 endonucleases with altered sequence for improved activity (e.g., improved kinetics, stability, half-life, compatibility with different PAMs, or functionality in different buffers).

[0019] In some embodiments, the present disclosure teaches the use of naturally occurring crRNA sequences (e.g., they are encoded by polynucleotides found in wild type organisms). In other embodiments, the crRNA sequences of the present disclosure are non-naturally occurring. In some embodiments, the crRNAs are engineered to target selected DNA sequences.

[0020] In some embodiments, the present disclosure teaches DNA assemblies wherein the Cpf1 CRISPR system of step (b) is targeted to a portion of the first DNA fragment that will be cleaved away from the first DNA fragment, such that the Cpf1 CRISPR system no longer targets the digested first DNA fragment.

[0021] In some embodiments, the present disclosure teaches methods of targeting Cpf1 CRISPR systems to cleave assembly DNA fragments in locations that will result in the creation of a sticky end that is compatible with a second DNA fragment (e.g., wherein the endonuclease creates a sticky end corresponding to the sequence overlap between the first DNA fragment and the second DNA fragment, such that the resulting sticky ends can hybridize). Thus, for the purposes of this disclosure, sequence overlap refers to a sequence present anywhere in both of the referenced DNA fragments. For example, a first DNA fragment might contain the sequence AAG at its 5′ end, while the second DNA fragment might contain the same AAG sequence near its center, starting at base pair 200 from its 5′ end.

[0022] In some embodiments, the present CLIC reactions are “single pot” such that steps (b) and (d) corresponding to the endonuclease digestion and ligation are conducted in the same reaction without needing to inactivate the Cpf1 CRISPR system, or otherwise purify the sequences between steps of the reaction.

[0023] In some embodiments, the present disclosure teaches that one or more DNA fragments in the CLIC reaction can comprise preexisting sticky ends compatible with the sticky end of the digested DNA fragments. For example, the present disclosure includes CLIC reactions in which a circular plasmid is cleaved with a Cpf1 endonuclease to remove an MCS site, which is then ligated to an insertion GOI that either had preexisting sticky ends, or was also digested by the Cpf1 endonuclease.

[0024] In some embodiments, the present disclosure teaches that a preexisting sticky end can be created by the staggered hybridization of two oligos with overhangs, or ends created through exonuclease reactions, or prior restriction digestions.

[0025] In other embodiments, the present disclosure teaches methods in which step (b) Cpf1 endonuclease digestion further comprises digesting the second DNA fragment with a second Cpf1 CRISPR system, thereby creating a sticky DNA end at the 5′ and/or 3′ of said second DNA fragment, wherein said digested second DNA fragment ceases to be a target for said second Cpf1 CRISPR endonuclease system. See FIG. 2 for an illustration of one such embodiment of the present disclosure.

[0026] In some embodiments, the present disclosure teaches that the first Cpf1 CRISPR system and the second Cpf1 CRISPR system are identical, such that a single Cpf1 CRISPR system could be programmed to cleave two or more DNA fragments. This approach is particularly feasible in embodiments in which the second DNA fragment is designed to match the target sequence of the first DNA sequence (e.g., engineering the ends of a gene insert to match the target sequence located on the inner edges of the MCS of the destination plasmid). In some embodiments, using the same Cpf1 CRISPR can still produce different sticky ends to maintain control over assembly order and direction.

[0027] In some embodiments, the present disclosure also teaches a method for editing the genome of a cell in vivo, said method comprising the steps of: a) introducing into the cell a Cpf1 CRISPR system comprising one or more vectors comprising: i) a first polynucleotide encoding a first crRNA that hybridizes to a first selected target sequence within the genome of the cell; ii) a second polynucleotide encoding a second crRNA that hybridizes to a second selected target within the genome of the cell; and ii) a third polynucleotide encoding a Cpf1 endonuclease; wherein components (a), (b), and (c) are expressed in the cell, and the Cpf1 endonuclease cleaves the cell's genome at the selected target sequences, thereby producing sticky ends on the cleaved ends of the cell's genome; wherein the first and second target sequences are positioned in an outwardly facing inverse orientation of a portion of the cell's genome slated for removal, such that removal of said portion of the cell's genome will also remove the first and second target sites from the genome; (b) annealing the resulting genome sticky ends to each other; and (c) ligating the annealed genome sticky ends from step (b).

[0028] Thus in some embodiments, the present disclosure teaches methods of introducing Cpf1 CRISPR complexes into cells by introducing polynucleotides capable of expressing the necessary crRNA and Cpf1 endonuclease components.

[0029] In some embodiments, the present disclosure also teaches methods of introducing insert sequences into cells via transformation. In some embodiments, the present disclosure teaches transformation of inserts sequences with preexisting sticky ends. In other embodiments, the present disclosure teaches insertion of sequences that will be processed in vivo. In some embodiments, the insert sequences of the present disclosure are introduced into the cell in linear form. In other embodiments, the sequences of the present disclosure are introduced in a circular plasmid. In some embodiments, the present disclosure teaches that the circular plasmid will be a replicating plasmid. In some embodiments the introduction of each Cpf1 CRISPR system component can be done in parallel (e.g., multiple plasmids with all the pieces), or sequentially (e.g., introducing some components first, then other components).

[0030] In some embodiments, the present disclosure also teaches methods of integrating selected components of the Cpf1 CRISPR system into the genome of the cell that will be edited. For example, in some embodiments, the cell may already comprise a polynucleotide encoding the Cpf1 endonuclease. In other embodiments, the cell may already comprise a polynucleotide encoding for a ligase.

[0031] Thus, in some embodiments, the present disclosure teaches that the one or more vectors of step (a) of the in vivo CLIC method may also comprise a fourth insert polynucleotide, wherein said insert polynucleotide is also cleaved by the Cpf1 endonuclease, thereby creating sticky ends on the insert polynucleotide that are compatible with the sticky ends of the cell's genome; wherein the annealing step (b) is modified to anneal the sticky ends of the genome to the sticky ends of the insert polynucleotide; and wherein the ligating step (c) is modified to ligate the annealed genome and insert sticky ends.

[0032] The present disclosure also teaches embodiments of the in vivo CLIC gene editing methods that do not introduce any genetic scars.

[0033] In some embodiments, the present disclosure teaches that the insert polynucleotide may also comprise copies of the target sequences for the introduced Cpf1 CRISPR systems, such that the insert polynucleotides are also processed in vivo to produce sticky ends. In some embodiments, the present disclosure teaches methods of targeting Cpf1 endonucleases such that they are position in an inwardly facing inverse orientation that ensures that digested insert polynucleotides are no longer substrates for the Cpf1 endonucleases.

[0034] In some embodiments, the present disclosure teaches that the specific targeting methods of the present disclosure for the digestion of the insert DNA and the genomic DNA, ensure that the resulting in vivo reactions proceed in a single direction (e.g., that ligated sticky ends are not subsequently re-digested by the Cpf1 endonuclease). In some embodiments, the present disclosure teaches that ensuring directionality in the digestion reactions improves the efficiency of the gene editing reactions.

[0035] Thus in some embodiments, the present disclosure teaches that the DNA inserts of the present disclosure also comprise two copies of the first target sequence positioned in an inwardly facing inverse orientation, such that cleavage of said insert polynucleotide by the Cpf1 endonuclease removes the first and second copies of the first target site from the insert polynucleotide.

[0036] In some embodiments, the in vivo CLIC methods of the present disclosure rely on endogenous DNA ligase activity to ligate to annealed sticky ends. In other embodiments, the present disclosure teaches introducing other ligase function into the edited cells. Thus, in some embodiments, the present disclosure teaches that the one or more vectors of the CLIC method comprise a fifth polynucleotide encoding a DNA ligase.

[0037] In some embodiments, the present disclosure teaches T4 and T7 ligases.

[0038] In some embodiments of the in vivo CLIC method, the present disclosure teaches that the Cpf1 endonuclease is non-naturally occurring. In other embodiments of the in vivo CLIC method, the present disclosure teaches that the Cpf1 endonuclease is naturally occurring and/or endogenous.

[0039] In some embodiments of the in vivo CLIC method, the present disclosure teaches that the crRNA is non-naturally occurring. In other embodiments of the in vivo CLIC method, the present disclosure teaches that the crRNA is naturally occurring and/or endogenous.

[0040] In some embodiments of the in vivo CLIC method, the present disclosure teaches that the ligase is non-naturally occurring. In other embodiments of the in vivo CLIC method, the present disclosure teaches that the ligase is naturally occurring and/or endogenous.

[0041] In some embodiments, the present disclosure teaches that the combination of the Cpf1 endonuclease, the crRNA, and (optionally) the ligase are non-naturally occurring.

[0042] In some embodiments, the present disclosure teaches a method for removing a transposon from the genome of a cell in vivo, said method comprising the steps of: a) introducing into the cell a Cpf1 CRISPR system comprising one or more vectors comprising: i) a first polynucleotide encoding a first crRNA that hybridizes to a first selected target sequence within the transposon; ii) a second polynucleotide encoding a second crRNA that hybridizes to a second selected target within the transposon; and ii) a third polynucleotide encoding a Cpf1 endonuclease; wherein components (a), (b), and (c) are expressed in the cell, and the Cpf1 endonuclease cleaves the cell's genome at the selected target sequences, thereby producing sticky ends on the cleaved ends of the cell's genome; wherein the first and second target sequences are positioned in an outwardly facing inverse orientation of within the transposon, such that removal of said transposon will also remove the first and second target sites from that portion of the genome; (b) annealing the resulting genome sticky ends to each other; and (c) ligating the annealed genome sticky ends from step (b); wherein the resulting ligated genome lacks said transposon.

### BRIEF DESCRIPTION OF THE FIGURES

[0043] FIG. 1A-B Comparison of the CRISPR Cas 9 and CRISPR Cpf1 systems of the present disclosure. A—Cas9 endonucleases are recruited to target dsDNA by tracrRNA and crRNA complexes. Cas 9 endonuclease produces blunt end cuts (dark arrows indicate cut locations). B-Cpf1 endonucleases only require crRNA guide polynucleotides. Cpf1 endonucleases produce sticky ends from staggered cuts depicted as dark arrows.

[0044] FIG. 2 Illustrates an embodiment of the present disclosure for CLIC single pot in vitro cloning using a Cpf1 endonuclease and ligase. A multiclonal site (MCS) or other non-desired insert is removed via Cpf1 digestion and is replaced with a gene of interest (GOI) insert. Cpf1 target sites located on DNA fragments slated for removal reduces nuclease interference with subsequent ligation reactions. Cpf1 endonuclease also reduces the incidence of MCS re-ligations.

[0045] FIG. 3 Illustrates another single pot in vitro cloning embodiment of the CLIC Cpf1 cloning methods of present disclosure. Various cassettes with different genes of interest (GOI) are flanked by Cpf1 target sites (top). After Cpf1-mediated cleavage of these cassettes (the source of these cassettes can be plasmids (as shown) or linear (e.g., PCR) fragments), the compatible ends facilitate ligation in the desired orientation and order (bottom). In this embodiment, Cpf1 target sites are located outside the GOI inserts, so as to not interfere with subsequent ligation steps. The resulting plasmid can be transformed into the host of interest (e.g., Escherichia coli).

[0046] FIG. 4A-C Illustrates several embodiments of the in vivo CLIC Cpf1 cloning methods of the present disclosure. A—Cpf1 can be designed to cut at two different target sites generating compatible ends. Using a ligase the double-strand break can be repaired by ligation, thereby removing the desired region (e.g., part of an open reading frame). Cpf1 target sites are located within the DNA region slated for removal in an outward facing orientation so as to reduce Cpf1 interference with subsequent ligation. B—Similarly, Cpf1 can be used to introduce new genetic material by cutting at two sites, generating a double stranded break (DSB) with two different sticky ends, and ligating a newly designed insert (e.g., an insert containing a beneficial SNP, such as the insert depicted in FIG. 4C). C—Using linear (PCR) fragments or an in vivo generated repair fragment with compatible overhangs (or also created using Cpf1 from a plasmid, as shown in FIG. 3) the DSB can be repaired by means of a ligase. Cpf1 enzymes are depicted in the target locations taught by some embodiments of the present disclosure (i.e., inside DNA regions being removed, and outside of inserts that will be ligated).

[0047] FIG. 5A-B Illustrates an embodiment of the CLIC two-part assembly methods of the present disclosure. A—Provides a high-level overview of the construct assembly. Black bent arrows represent Cpf1 cut sites. Shaded boxes represent distinct sticky end overhang sequences a′-c′. B—Provides additional sequence details for the cleavage portion indicated by the dotted boxes of FIG. 5A (OH=overhang). Note that while the overhangs are shown in different shades for clarity, the actual assembly is scarless since the overhangs are derived from the sequences themselves.

[0048] FIG. 6 Illustrates a method 100 for sequence-specific deletion of a target base DNA molecule, according to an embodiment of the present disclosure.

[0049] FIG. 7 Illustrates a method 200 for sequence-specific sequence replacement of a target base DNA molecule region slated for deletion with a new DNA insert molecule, according to an embodiment of the present disclosure.

[0050] FIG. 8 Depicts the results of FnCpf1 purification. SDS page of BSA (Lane 1), and purified FnCpf1 according to SEQ ID No: 82 Arrow indicates expected size of Cpf1 polypeptide at 150 kDa.

[0051] FIG. 9 Depicts a quantification of purified FnCpf1 polypeptide using Bradford Assay. Purified FnCpf1 solution achieved concentration of 0.60 mg/ml.

[0052] FIG. 10 Depicts the results of in vitro CLIC Cpf1 digestion and re-ligation of PCR product. Agarose gel with Ethidium Bromide stain. Lane 1 shows expected 500 bp and 1500 bp digestion products from Cpf1 digestion. Lane 2 shows re-ligated 2000 bp product after Cpf1 inactivation and product ligation.

[0053] FIG. 11 Depicts the results of an in vitro CLIC reaction. Two PCR products were digested and ligated via compatible sticky ends with T7 DNA ligase in a single reaction. Lane 1 shows results of control reaction omitting T7 ligase. Lane 2 shows a band at 3000 bp, corresponding to ligated product.

[0054] FIG. 12 Depicts the results of an in vivo CLIC digestion of target resistance plasmids. Natively expressed Cpf1/crRNA complexes successfully targeted Wild Type resistance plasmids for reduced cell growth in antibiotic-containing media. Cpf1-mediated digestion could be abrogated by mutating the PAM of the resistance plasmid.

[0055] FIG. 13 Illustrates an embodiment of Cpf1 assembly methods of Example 8. Each panel provides an illustration of the experimental design described in Example 8. A chloramphenicol resistance gene was cloned into a kanamycin resistant backbone plasmid to create a dual resistance plasmid. Dual resistance plasmids were then transformed into bacteria, which was subsequently cultured in media augmented with kanamycin and chloramphenicol antibiotics. Resistant colonies indicated successful Cpf1 cloning assemblies.

[0056] FIG. 14 Depicts the results of the Cpf1 cloning assembly experiment of Example 8. The y-axis represents the number of recovered colonies growing in media augmented with kanamycin and chloramphenicol. Resistant colonies indicate successful Cpf1 cloning assemblies. The results showed a ligase-dependent assembly of dual resistance plasmids.

[0057] FIG. 15 Depicts the vector map for pJDI427. CRISPR landing sites used in the Cpf1 assembly are labeled as Guide A and Guide B.

[0058] FIG. 16 Depicts the vector map for pJDI429. CRISPR landing sites used in the Cpf1 assembly are labeled as Guide B and Guide C.

[0059] FIG. 17 Depicts the vector map for pJDI430. CRISPR landing sites used in the Cpf1 assembly are labeled as Guide D and Guide B.

[0060] FIG. 18 Depicts the vector map for pJDI431. CRISPR landing sites used in the Cpf1 assembly are labeled as Guide D and Guide C.

[0061] FIG. 19 Depicts the vector map for pJDI432. CRISPR landing sites used in the Cpf1 assembly are labeled as Guide A and Guide B.

[0062] FIG. 20 Depicts the vector map for pJDI434. CRISPR landing sites used in the Cpf1C assembly are labeled as Guide B and Guide C.

[0063] FIG. 21 Depicts the vector map for pJDI435. CRISPR landing sites used in the Cpf1 assembly are labeled as Guide D and Guide B.

[0064] FIG. 22 Depicts the vector map for pJDI436. CRISPR landing sites used in the Cpf1 assembly are labeled as Guide D and Guide C.

### DETAILED DESCRIPTION

### Definitions

[0065] While the following terms are believed to be well understood by one of ordinary skill in the art, the following definitions are set forth to facilitate explanation of the presently disclosed subject matter.

[0066] The term “a” or “an” refers to one or more of that entity, i.e., can refer to a plural referents. As such, the terms “a” or “an”, “one or more” and “at least one” are used interchangeably herein. In addition, reference to “an element” by the indefinite article “a” or “an” does not exclude the possibility that more than one of the elements is present, unless the context clearly requires that there is one and only one of the elements.

[0067] The term “prokaryotes” is art recognized and refers to cells, which contain no nucleus or other cell organelles. The prokaryotes are generally classified in one of two domains, the Bacteria and the Archaea. The definitive difference between organisms of the Archaea and Bacteria domains is based on fundamental differences in the nucleotide base sequence in the 16S ribosomal RNA.

[0068] A “eukaryote” is any organism whose cells contain a nucleus and other organelles enclosed within membranes. Eukaryotes belong to the taxon Eukarya or Eukaryota. The defining feature that sets eukaryotic cells apart from prokaryotic cells (the aforementioned Bacteria and Archaea) is that they have membrane-bound organelles, especially the nucleus, which contains the genetic material, and is enclosed by the nuclear envelope.

[0069] The term “Archaea” refers to a categorization of organisms of the division Mendosicutes, typically found in unusual environments and distinguished from the rest of the prokaryotes by several criteria, including the number of ribosomal proteins and the lack of muramic acid in cell walls. On the basis of ssrRNA analysis, the Archaea consist of two phylogenetically-distinct groups: Crenarchaeota and Euryarchaeota. On the basis of their physiology, the Archaea can be organized into three types: methanogens (prokaryotes that produce methane); extreme halophiles (prokaryotes that live at very high concentrations of salt (NaCl); and extreme (hyper) thermophilus (prokaryotes that live at very high temperatures). Besides the unifying archaeal features that distinguish them from Bacteria (i.e., no murein in cell wall, ester-linked membrane lipids, etc.), these prokaryotes exhibit unique structural or biochemical attributes which adapt them to their particular habitats. The Crenarchaeota consists mainly of hyperthermophilic sulfur-dependent prokaryotes and the Euryarchaeota contains the methanogens and extreme halophiles.

[0070] “Bacteria” or “eubacteria” refers to a domain of prokaryotic organisms. Bacteria include at least 11 distinct groups as follows: (1) Gram-positive (gram+) bacteria, of which there are two major subdivisions: (1) high G+C group (Actinomycetes, Mycobacteria, Micrococcus, others) (2) low G+C group (Bacillus, Clostridia, Lactobacillus, Staphylococci, Streptococci, Mycoplasmas); (2) Proteobacteria, e.g., Purple photosynthetic+non-photosynthetic Gram-negative bacteria (includes most “common” Gram-negative bacteria); (3) Cyanobacteria, e.g., oxygenic phototrophs; (4) Spirochetes and related species; (5) Planctomyces; (6) Bacteroides, Flavobacteria; (7) Chlamydia; (8) Green sulfur bacteria; (9) Green non-sulfur bacteria (also anaerobic phototrophs); (10) Radioresistant micrococci and relatives; (11) Thermotoga and Thermosipho thermophiles.

[0071] The terms “genetically modified host cell,” “recombinant host cell,” and “recombinant strain” are used interchangeably herein and refer to host cells that have been genetically modified by the cloning and transformation methods of the present disclosure. Thus, the terms include a host cell (e.g., bacteria, yeast cell, fungal cell, CHO, human cell, etc.) that has been genetically altered, modified, or engineered, such that it exhibits an altered, modified, or different genotype and/or phenotype (e.g., when the genetic modification affects coding nucleic acid sequences of the microorganism), as compared to the naturally-occurring microorganism from which it was derived. It is understood that the terms refer not only to the particular recombinant microorganism in question, but also to the progeny or potential progeny of such a microorganism.

[0072] The term “genetically engineered” may refer to any manipulation of a host cell's genome (e.g. by insertion or deletion of nucleic acids).

[0073] As used herein, the term “nucleic acid” refers to a polymeric form of nucleotides of any length, either ribonucleotides or deoxyribonucleotides, or analogs thereof. This term refers to the primary structure of the molecule, and thus includes double- and single-stranded DNA, as well as double- and single-stranded RNA. It also includes modified nucleic acids such as methylated and/or capped nucleic acids, nucleic acids containing modified bases, backbone modifications, and the like. The terms “nucleic acid” and “nucleotide sequence” are used interchangeably.

[0074] As used herein, the term “gene” refers to any segment of DNA associated with a biological function. Thus, genes include, but are not limited to, coding sequences and/or the regulatory sequences required for their expression. Genes can also include non-expressed DNA segments that, for example, form recognition sequences for other proteins. Genes can be obtained from a variety of sources, including cloning from a source of interest or synthesizing from known or predicted sequence information, and may include sequences designed to have desired parameters.

[0075] As used herein, the term “homologous” or “homologue” or “ortholog” is known in the art and refers to related sequences that share a common ancestor or family member and are determined based on the degree of sequence identity. The terms “homology,” “homologous,” “substantially similar” and “corresponding substantially” are used interchangeably herein. They refer to nucleic acid fragments wherein changes in one or more nucleotide bases do not affect the ability of the nucleic acid fragment to mediate gene expression or produce a certain phenotype. These terms also refer to modifications of the nucleic acid fragments of the instant disclosure such as deletion or insertion of one or more nucleotides that do not substantially alter the functional properties of the resulting nucleic acid fragment relative to the initial, unmodified fragment. It is therefore understood, as those skilled in the art will appreciate, that the disclosure encompasses more than the specific exemplary sequences. These terms describe the relationship between a gene found in one species, subspecies, variety, cultivar or strain and the corresponding or equivalent gene in another species, subspecies, variety, cultivar or strain. For purposes of this disclosure, homologous sequences are compared. “Homologous sequences”, “homologues”, or “orthologs” are thought, believed, or known to be functionally related. A functional relationship may be indicated in any one of a number of ways, including, but not limited to: (a) degree of sequence identity and/or (b) the same or similar biological function. Preferably, both (a) and (b) are indicated. Homology can be determined using software programs readily available in the art, such as those discussed in Current Protocols in Molecular Biology (F. M. Ausubel et al., eds., 1987) Supplement 30, section 7.718, Table 7.71. Some alignment programs are MacVector (Oxford Molecular Ltd, Oxford, U.K.), ALIGN Plus (Scientific and Educational Software, Pennsylvania) and AlignX (Vector NTI, Invitrogen, Carlsbad, Calif.). Another alignment program is Sequencher (Gene Codes, Ann Arbor, Mich.), using default parameters.

[0076] As used herein, the term “nucleotide change” refers to, e.g., nucleotide substitution, deletion, and/or insertion, as is well understood in the art. For example, mutations contain alterations that produce silent substitutions, additions, or deletions, but do not alter the properties or activities of the encoded protein or how the proteins are made.

[0077] As used herein, the term “protein modification” refers to, e.g., amino acid substitution, amino acid modification, deletion, and/or insertion, as is well understood in the art.

[0078] As used herein, the term “at least a portion” or “fragment” of a nucleic acid or polypeptide means a portion having the minimal size characteristics of such sequences, or any larger fragment of the full length molecule, up to and including the full length molecule. A fragment of a polynucleotide of the disclosure may encode a biologically active portion of a genetic regulatory element. A biologically active portion of a genetic regulatory element can be prepared by isolating a portion of one of the polynucleotides of the disclosure that comprises the genetic regulatory element and assessing activity as described herein. Similarly, a portion of a polypeptide may be 4 amino acids, 5 amino acids, 6 amino acids, 7 amino acids, and so on, going up to the full length polypeptide. The length of the portion to be used will depend on the particular application. A portion of a nucleic acid useful as a hybridization probe may be as short as 12 nucleotides; in some embodiments, it is 20 nucleotides. A portion of a polypeptide useful as an epitope may be as short as 4 amino acids. A portion of a polypeptide that performs the function of the full-length polypeptide would generally be longer than 4 amino acids.

[0079] For PCR amplifications of the polynucleotides disclosed herein, oligonucleotide primers can be designed for use in PCR reactions to amplify corresponding DNA sequences from cDNA or genomic DNA extracted from any organism of interest. Methods for designing PCR primers and PCR cloning are generally known in the art and are disclosed in Sambrook et al. (2001) Molecular Cloning: A Laboratory Manual (3rd ed., Cold Spring Harbor Laboratory Press, Plainview, N.Y.). See also Innis et al., eds. (1990) PCR Protocols: A Guide to Methods and Applications (Academic Press, New York); Innis and Gelfand, eds. (1995) PCR Strategies (Academic Press, New York); and Innis and Gelfand, eds. (1999) PCR Methods Manual (Academic Press, New York). Known methods of PCR include, but are not limited to, methods using paired primers, nested primers, single specific primers, degenerate primers, gene-specific primers, vector-specific primers, partially-mismatched primers, and the like.

[0080] The term “primer” as used herein refers to an oligonucleotide which is capable of annealing to the amplification target allowing a DNA polymerase to attach, thereby serving as a point of initiation of DNA synthesis when placed under conditions in which synthesis of primer extension product is induced, i.e., in the presence of nucleotides and an agent for polymerization such as DNA polymerase and at a suitable temperature and pH. The (amplification) primer is preferably single stranded for maximum efficiency in amplification. Preferably, the primer is an oligodeoxyribonucleotide. The primer must be sufficiently long to prime the synthesis of extension products in the presence of the agent for polymerization. The exact lengths of the primers will depend on many factors, including temperature and composition (A/T vs. G/C content) of primer. A pair of bi-directional primers consists of one forward and one reverse primer as commonly used in the art of DNA amplification such as in PCR amplification.

[0081] The terms “stringency” or “stringent hybridization conditions” refer to hybridization conditions that affect the stability of hybrids, e.g., temperature, salt concentration, pH, formamide concentration and the like. These conditions are empirically optimized to maximize specific binding and minimize non-specific binding of primer or probe to its target nucleic acid sequence. The terms as used include reference to conditions under which a probe or primer will hybridize to its target sequence, to a detectably greater degree than other sequences (e.g. at least 2-fold over background). Stringent conditions are sequence dependent and will be different in different circumstances. Longer sequences hybridize specifically at higher temperatures. Generally, stringent conditions are selected to be about 5° C. lower than the thermal melting point (Tm) for the specific sequence at a defined ionic strength and pH. The Tm is the temperature (under defined ionic strength and pH) at which 50% of a complementary target sequence hybridizes to a perfectly matched probe or primer. Typically, stringent conditions will be those in which the salt concentration is less than about 1.0 M Na+ ion, typically about 0.01 to 1.0 M Na+ ion concentration (or other salts) at pH 7.0 to 8.3 and the temperature is at least about 30° C. for short probes or primers (e.g. 10 to 50 nucleotides) and at least about 60° C. for long probes or primers (e.g. greater than 50 nucleotides). Stringent conditions may also be achieved with the addition of destabilizing agents such as formamide. Exemplary low stringent conditions or “conditions of reduced stringency” include hybridization with a buffer solution of 30% formamide, 1 M NaCl, 1% SDS at 37° C. and a wash in 2×SSC at 40° C. Exemplary high stringency conditions include hybridization in 50% formamide, IM NaCl, 1% SDS at 37° C., and a wash in 0.1×SSC at 60° C. Hybridization procedures are well known in the art and are described by e.g. Ausubel et al., 1998 and Sambrook et al., 2001. In some embodiments, stringent conditions are hybridization in 0.25 M Na2HPO4 buffer (pH 7.2) containing 1 mM Na2EDTA, 0.5-20% sodium dodecyl sulfate at 45° C., such as 0.5%, 1%, 2%, 3%, 4%, 5%, 6%, 7%, 8%, 9%, 10%, 11%, 12%, 13%, 14%, 15%, 16%, 17%, 18%, 19% or 20%, followed by a wash in 5×SSC, containing 0.1% (w/v) sodium dodecyl sulfate, at 55° C. to 65° C.

[0082] As used herein, “promoter” refers to a DNA sequence capable of controlling the expression of a coding sequence or functional RNA. The promoter sequence may consist of proximal and more distal upstream elements, the latter elements often referred to as enhancers. Accordingly, an “enhancer” is a DNA sequence that can stimulate promoter activity, and may be an innate element of the promoter or a heterologous element inserted to enhance the level or tissue specificity of a promoter.

[0083] As used herein, the term “heterologous” refers to a nucleic acid sequence, which is not naturally found in the particular organism.

[0084] As used herein, the term “endogenous,” “endogenous gene,” refers to the naturally occurring copy of a gene.

[0085] As used herein, the term “naturally occurring” refers to a gene derived from a naturally occurring source. In some embodiments, a naturally occurring gene refers to a gene of a wild type (non-transgene) gene, whether located in its endogenous setting within the source organism, or if placed in a “heterologous” setting, when introduced in a different organism. Thus, for the purposes of this disclosure, a “non-naturally occurring” gene is a gene that has been synthesized, mutated, or otherwise modified to have a different sequence from known natural genes. In some embodiments, the modification may be at the protein level (e.g., amino acid substitutions). In other embodiments, the modification may be at the DNA level, without any effect on protein sequence (e.g., codon optimization). In some embodiments, the non-naturally occurring gene may be a chimeric gene as described infra.

[0086] As used herein, the term “exogenous” is used interchangeably with the term “heterologous,” and refers to a substance coming from some source other than its native source. For example, the terms “exogenous protein,” or “exogenous gene” refer to a protein or gene from a non-native source or location, and that have been artificially supplied to a biological system. Artificially mutated variants of endogenous genes are considered “exogenous” for the purposes of this disclosure.

[0087] As used herein, the phrases “recombinant construct”, “expression construct”, “chimeric construct”, “construct”, and “recombinant DNA construct” are used interchangeably herein. A recombinant construct comprises an artificial combination of nucleic acid fragments, e.g., regulatory and coding sequences that are not found together in nature. For example, a chimeric construct may comprise regulatory sequences and coding sequences that are derived from different sources, or regulatory sequences and coding sequences derived from the same source, but arranged in a manner different than that found in nature. Such construct may be used by itself or may be used in conjunction with a vector. If a vector is used then the choice of vector is dependent upon the method that will be used to transform host cells as is well known to those skilled in the art. For example, a plasmid vector can be used. The skilled artisan is well aware of the genetic elements that must be present on the vector in order to successfully transform, select and propagate host cells comprising any of the isolated nucleic acid fragments of the disclosure. The skilled artisan will also recognize that different independent transformation events will result in different levels and patterns of expression (Jones et al., (1985) EMBO J. 4:2411-2418; De Almeida et al., (1989) Mol. Gen. Genetics 218:78-86), and thus that multiple events must be screened in order to obtain lines displaying the desired expression level and pattern. Such screening may be accomplished by Southern analysis of DNA, Northern analysis of mRNA expression, immunoblotting analysis of protein expression, or phenotypic analysis, among others. Vectors can be plasmids, viruses, bacteriophages, pro-viruses, phagemids, transposons, artificial chromosomes, and the like, that replicate autonomously or can integrate into a chromosome of a host cell. A vector can also be a naked RNA polynucleotide, a naked DNA polynucleotide, a polynucleotide composed of both DNA and RNA within the same strand, a poly-lysine-conjugated DNA or RNA, a peptide-conjugated DNA or RNA, a liposome-conjugated DNA, or the like, that is not autonomously replicating. As used herein, the term “expression” refers to the production of a functional end-product e.g., an mRNA or a protein (precursor or mature).

[0088] The term “operably linked” means in this context the sequential arrangement of the promoter polynucleotide according to the disclosure with a further oligo- or polynucleotide, resulting in transcription of said further polynucleotide. In some embodiments, the promoter sequences of the present disclosure are inserted just prior to a gene's 5′UTR, or open reading frame. In other embodiments, the operably linked promoter sequences and gene sequences of the present disclosure are separated by one or more linker nucleotides.

[0089] The term “CRISPR RNA” or “crRNA” refers to the guide RNA strand responsible for hybridizing with target DNA sequences, and recruiting CRISPR endonucleases. crRNAs may be naturally occurring, or may be synthesized according to any known method of producing RNA. In some embodiments, the term crRNA, guide RNA and sgRNA are equivalent for Cpf1, and may be interchangeably used throughout this document.

[0090] The term “guide sequence” or “spacer” refers to the portion of a crRNA that is responsible for hybridizing with the target DNA.

[0091] The term “protospacer” refers to the DNA sequence targeted by a crRNA guide strand. In some embodiments, the protospacer sequence hybridizes with the crRNA guide sequence/spacer of a CRISPR complex.

[0092] The term “seed region” refers to the ribonucleic sequence responsible for initial complexation between a DNA sequence and a CRISPR ribonucleoprotein complex. Mismatches between the seed region and a target DNA sequence have a stronger effect on target site recognition and cleavage than the remainder of the crRNA/sgRNA sequence. In some embodiments, a single mismatch in the seed region of a crRNA can render a CRISPR complex inactive at that binding site. In some embodiments, the seed regions for Cas9 endonucleases are located along that last 12 nts of the 3′ portion of the guide sequence, which correspond (hybridize) to the portion of the protospacer target sequence that is adjacent to the PAM. In some embodiments, the seed regions for Cpf1 endonucleases are located along the first 5 nts of the 5′ portion of the guide strand, which correspond (hybridize) to the portion of the protospacer target sequence adjacent to the PAM.

[0093] The term “Guide RNA” or “gRNA” as used herein refers to an RNA sequence or combination of sequences capable of recruiting a CRISPR endonuclease to a target sequence. Thus as used herein, a guide RNA can be a natural or synthetic crRNA (e.g., for Cpf1), a natural or synthetic crRNA/tracrRNA hybrid (e.g., for Cas9), or a single-guide RNA (sgRNA).

[0094] The term “CRISPR complex” as used herein, refers to a CRISPR endonuclease that is operably associated with a Guide RNA. In some embodiments, a CRISPR complex of the present disclosure is a Cpf1 endonuclease operable associated with a crRNA, such that the complex is capable of cleaving a DNA region targeted by the crRNA. In some embodiments the terms CRISPR complex and CRISPR system are used interchangeably.

[0095] The term “CRISPR landing site” as used herein, refers to a DNA sequence capable of being targeted by a CRISPR complex. Thus, in some embodiments, a CRISPR landing site comprises a proximately placed protospacer/Protopacer Adjacent Motif combination sequence that is capable of being cleaved a CRISPR endonuclease complex. The term “validated CRISPR landing site” refers to a CRISPR landing site for which there exists a guide RNA capable of inducing high efficiency cleaving of said sequence. Thus, the term validated should be interpreted as meaning that the sequence has been previously shown to be cleavable by a CRISPR complex. Each “validated CRISPR landing site” will by definition confirm the existence of a tested guide RNA associated with the validation.

[0096] The term “sticky end(s)” refers to double stranded polynucleotide molecule end that comprises a sequence overhang. In some embodiments, the sticky end can be a dsDNA molecule end with a 5′ or 3′ sequence overhang. In some embodiments, the sticky ends of the present disclosure are capable of hybridizing with compatible sticky ends of the same or other molecules. Thus in one embodiment, a sticky end on the 3′ of a first DNA fragment may hybridize with a compatible sticky end on a second DNA fragment. In some embodiments, these hybridized sticky ends can be sewn together by a ligase. In other embodiments, the sticky ends might require extension of the overhangs to complete the dsDNA molecule prior to ligation. The term “genetic scar(s)” refers to any undesirable sequence introduced into a nucleic acid sequence by DNA manipulation methods. For example, in some embodiments, the present disclosure teaches genetic scars such as restriction enzyme binding sites, sequence adapters or spacers to accommodate cloning, TA-sites, scars left over from NHEJ, etc. In some embodiments, the present disclosure teaches methods of scarless cloning and gene editing.

[0097] As used herein the term “targeted” refers to the expectation that one item or molecule will interact with another item or molecule with a degree of specificity, so as to exclude non-targeted items or molecules. For example, a first polynucleotide that is targeted to a second polynucleotide, according to the present disclosure has been designed to hybridize with the second polynucleotide in a sequence specific manner (e.g., via Watson-crick base pairing). In some embodiments, the selected region of hybridization is designed so as to render the hybridization unique to the one, or more targeted regions. A second polynucleotide can cease to be a target of a first targeting polynucleotide, if its targeting sequence (region of hybridization) is mutated, or is otherwise removed/separated from the second polynucleotide.

### Gene Editing

[0098] The principles of in vivo CRISPR-based editing largely rely on natural cellular DNA repair systems. Double-stranded dsDNA breaks introduced by nucleases are repaired by either non-homologous end-joining (NHEJ) or homology-directed repair (HDR), or single strand annealing (SSA), or microhomology end joining (MMEJ).

[0099] HDR relies on a template DNA containing sequences homologous to the region surrounding the targeted site of DNA cleavage. Cellular repair proteins use the homology between the exogenously supplied or endogenous DNA sequences and the site surrounding the DNA break to repair the dsDNA break, replacing the break with the sequence on the template DNA. Failure to integrate the template DNA however, can result in NHEJ, MMEJ, or SSA. NHEJ, MMEJ and SSA are error-prone processes that are often accompanied by insertion or deletion of nucleotides (indels) at the target site, resulting in genetic knockout (silencing) of the targeted region of the genome due to frameshift mutations or insertions of a premature stop codon. Cpf1-mediated editing can also function via traditional hybridization of overhangs created by the endonuclease, followed by ligation.

[0100] CRISPR endonucleases are also useful for in vitro DNA manipulations, as discussed in later sections of this disclosure.

[0101] DNA Nucleases

[0102] In some embodiments, the present disclosure teaches methods and compositions for gene editing utilizing DNA nucleases. In some embodiments, the present disclosure teaches methods of gene editing using any targetable DNA nuclease (e.g., Cpf1, Cas9, or other natural or synthetic Targetable Enzyme).

[0103] CRISPR systems, transcription activator-like effector nucleases (TALENs), zinc finger nucleases (ZFNs), and FokI restriction enzymes are some of the sequence-specific nucleases that have been used as gene editing tools. These enzymes are able to target their nuclease activities to desired target loci through interactions with guide regions engineered to recognize sequences of interest. In some embodiments, the present disclosure teaches CRISPR-based gene editing methods

[0104] CRISPR Systems

[0105] CRISPR (Clustered Regularly Interspaced Short Palindromic Repeats) and CRISPR-associated (cas) endonucleases were originally discovered as adaptive immunity systems evolved by bacteria and archaea to protect against viral and plasmid invasion. Naturally occurring CRISPR/Cas systems in bacteria are composed of one or more Cas genes and one or more CRISPR arrays consisting of short palindromic repeats of base sequences separated by genome-targeting sequences acquired from previously encountered viruses and plasmids (called spacers). (Wiedenheft, B., et. al. Nature. 2012; 482:331; Bhaya, D., et. al., Annu. Rev. Genet. 2011; 45:231; and Terms, M. P. et. al., Curr. Opin. Microbiol. 2011; 14:321). Bacteria and archaea possessing one or more CRISPR loci, respond to viral or plasmid challenge by integrating short fragments of foreign sequence (protospacers) into the host chromosome at the proximal end of the CRISPR array. Transcription of CRISPR loci generates a library of CRISPR-derived RNAs (crRNAs) containing sequences complementary to previously encountered invading nucleic acids (Haurwitz, R. E., et. al., Science. 2012:329; 1355; Gesner, E. M., et. al., Nat. Struct. Mol. Biol. 2001:18; 688; Jinek, M., et. al., Science. 2012:337; 816-21). Target recognition by crRNAs occurs through complementary base pairing with target DNA, which directs cleavage of foreign sequences by means of Cas proteins. (Jinek et. al. 2012 “A Programmable dual-RNA-guided DNA endonuclease in adaptive bacterial immunity.” Science. 2012:337; 816-821).

[0106] There are at least five main CRISPR system types (Type I, II, III, IV and V) and at least 16 distinct subtypes (Makarova, K. S., et al., Nat Rev Microbiol. 2015. Nat. Rev. Microbiol. 13, 722-736). CRISPR systems are also classified based on their effector proteins. Class 1 systems possess multi-subunit crRNA-effector complexes, whereas in class 2 systems all functions of the effector complex are carried out by a single protein (e.g., Cas9 or Cpf1). In some embodiments, the present disclosure teaches using type II and/or type V single-subunit effector systems. Thus, in some embodiments, the present disclosure teaches using class 2 CRISPR systems.

[0107] CRISPR Cas9

[0108] In some embodiments, the present disclosure teaches methods of gene editing using a Type II CRISPR system. In some embodiments, the present disclosure teaches Cas9 Type II CRISPR systems. Type II systems rely on a 1) single endonuclease protein, ii) a transactiving crRNA (tracrRNA), and iii) a crRNA where a ˜20-nucleotide (nt) portion of the 5′ end of crRNA is complementary to a target nucleic acid. The region of a CRISPR crRNA strand that is complementary to its target DNA protospacer is hereby referred to as “guide sequence.”

[0109] In some embodiments, the tracrRNA and crRNA components of a Type II system can be replaced by a single-guide RNA (sgRNA). The sgRNA can include, for example, a nucleotide sequence that comprises an at least 12-20 nucleotide sequence complementary to the target DNA sequence (guide sequence) and can include a common scaffold RNA sequence at its 3′ end. As used herein, “a common scaffold RNA” refers to any RNA sequence that mimics the tracrRNA sequence or any RNA sequences that function as a tracrRNA.

[0110] Cas9 endonucleases produce blunt end DNA breaks, and are recruited to target DNA by a combination of a crRNA and a tracrRNA oligos, which tether the endonuclease via complementary hybridization of the RNA CRISPR complex. (see solid triangle arrows in FIG. 1A)

[0111] In some embodiments, DNA recognition by the crRNA/endonuclease complex requires additional complementary base-pairing with a protospacer adjacent motif (PAM) (e.g., 5′-NGG-3′) located in a 3′ portion of the target DNA, downstream from the target protospacer. (Jinek, M., et. al., Science. 2012:337; 816-821). In some embodiments, the PAM motif recognized by a Cas9 varies for different Cas9 proteins.

[0112] In some embodiments, one skilled in the art can appreciate that the Cas9 disclosed herein can be any variant derived or isolated from any source. For example, in some embodiments, the Cas9 peptide of the present disclosure can include one or more of SEQ ID Nos selected from SEQ ID NO: 1, SEQ ID NO: 2, SEQ ID NO: 3, SEQ ID NO: 4, SEQ ID NO: 5, and SEQ ID NO: 6. In other embodiments, the Cas9 peptide of the present disclosure can include one or more of the mutations described in the literature, including but not limited to the functional mutations described in: Fonfara et al. Nucleic Acids Res. 2014 February; 42(4):2577-90; Nishimasu H. et al. Cell. 2014 Feb. 27; 156(5):935-49; Jinek M. et al. Science. 2012 337:816-21; and Jinek M. et al. Science. 2014 Mar. 14; 343(6176); see also U.S. patent application Ser. No. 13/842,859 filed Mar. 15, 2013, which is hereby incorporated by reference; further, see U.S. Pat. Nos. 8,697,359; 8,771,945; 8,795,965; 8,865,406; 8,871,445; 8,889,356; 8,895,308; 8,906,616; 8,932,814; 8,945,839; 8,993,233; and 8,999,641, which are all hereby incorporated by reference. Thus, in some embodiments, the systems and methods disclosed herein can be used with the wild type Cas9 protein having double-stranded nuclease activity, Cas9 mutants that act as single stranded nickases, or other mutants with modified nuclease activity.

[0113] In some embodiments, the present disclosure teaches methods of in vivo and in vitro genetic manipulation using modified Cas9 endonucleases to produce a Targetable Enzyme. For example, in some embodiments, the present disclosure teaches use of Cas9 nickases. In some embodiments, the present disclosure teaches Cas9 chimeric fusion proteins with nuclease domains that produce sticky domains. That is, in some embodiments, the present disclosure teaches enzymatically inactive Cas9 domains translationally fused (e.g., N- or C-terminal fusions) with a DNA nuclease capable of producing 3′ or 5′ overhangs. The present disclosure teaches methods of creating chimeric proteins in later sections of the document.

### CRISPR Cpf1

[0114] In other embodiments, the present disclosure teaches methods of gene editing using a Type V CRISPR system. In some embodiments, the present disclosure teaches methods of using CRISPR from Prevotella and Francisella 1 (Cpf1).

[0115] The Cpf1 CRISPR systems of the present disclosure comprise 1) a single endonuclease protein, and ii) a crRNA, wherein a portion of the 3′ end of crRNA contains the guide sequence complementary to a target nucleic acid. In this system, the Cpf1 nuclease is directly recruited to the target DNA by the crRNA (see solid triangle arrows in FIG. 1B). In some embodiments, guide sequences for Cpf1 must be at least 12nt, 13nt, 14nt, 15nt, or 16nt in order to achieve detectable DNA cleavage, and a minimum of 14nt, 15nt, 16nt, 17nt, or 18nt to achieve efficient DNA cleavage.

[0116] The Cpf1 systems of the present disclosure differ from Cas9 in a variety of ways. First, unlike Cas9, Cpf1 does not require a separate tracrRNA for cleavage. In some embodiments, Cpf1 crRNAs can be as short as about 42-44 bases long—of which 23-25 nts are guide sequence and 19 nts are the constitutive direct repeat sequence. In contrast, the combined Cas9 tracrRNA and crRNA synthetic sequences can be about 100 bases long. In some embodiments, the present disclosure will refer to a crRNA for Cpf1 as a “guide RNA.”

[0117] Second, Cpf1 has different PAM requirements. For example, FnCpf1 prefers a “TTN” PAM motif that is located 5′ upstream of its target. This is in contrast to the “NGG” PAM motifs located on the 3′ of the target DNA for Cas9 systems. In some embodiments, the uracil base immediately preceding the guide sequence cannot be substituted (Zetsche, B. et al. 2015. “Cpf1 Is a Single RNA-Guided Endonuclease of a Class 2 CRISPR-Cas System” Cell 163, 759-771, which is hereby incorporated by reference in its entirety for all purposes).

[0118] Third, the cut sites for Cpf1 are staggered by about 3-5 bases, which create “sticky ends” (Kim et al., 2016. “Genome-wide analysis reveals specificities of Cpf1 endonucleases in human cells” published online Jun. 6, 2016). These sticky ends with 3-5 bp overhangs are thought to facilitate NHEJ-mediated-ligation, and improve gene editing of DNA fragments with matching ends. The cut sites are in the 3′ end of the target DNA, distal to the 5′ end where the PAM is. The cut positions usually follow the 18th base on the non-hybridized strand and the corresponding 23rd base on the complementary strand hybridized to the crRNA (FIG. 1B).

[0119] Fourth, in Cpf1 complexes, the “seed” region is located within the first 5 nt of the guide sequence. Cpf1 crRNA seed regions are highly sensitive to mutations, and even single base substitutions in this region can drastically reduce cleavage activity (see Zetsche B. et al. 2015 “Cpf1 Is a Single RNA-Guided Endonuclease of a Class 2 CRISPR-Cas System” Cell 163, 759-771). Critically, unlike the Cas9 CRISPR target, the cleavage sites and the seed region of Cpf1 systems do not overlap. Additional guidance on designing Cpf1 crRNA targeting oligos is available on (Zetsche B. et al. 2015. “Cpf1 Is a Single RNA-Guided Endonuclease of a Class 2 CRISPR-Cas System” Cell 163, 759-771).

[0120] Persons skilled in the art will appreciate that the Cpf1 disclosed herein can be any variant derived or isolated from any source. For example, in some embodiments, the Cpf1 peptide of the present disclosure can include one or more of SEQ ID Nos selected from SEQ ID NO: 7, 8, 9, 10, 11, 12, 13, 14, 15, 16, 17, 18, 19, 20, 21, 22, 37, 38, 39, 40, 41, 42, 43, 44, 45, 46, 47, 48, 49, 50, 51, 52, 53, 54, 55, 56, 57, 58, 59, 60, 61, 62, 63, 64, 65, 66, 67, 68, 69, 70, 71, 72, 73, 74, 75, 76, 77, 78 or 82, or any variants thereof. In some embodiments, the Cpf1 nuclease of the present disclosure comprises the sequence in SEQ ID NO: 7. In some embodiments, the Cpf1 nuclease of the present disclosure comprises the sequence in SEQ ID NO: 82.

### Modified Non-Naturally Occurring CRISPR Variants

[0121] In some embodiments, the present disclosure teaches modified CRISPR Cpf1 variants for improved gene editing efficiency. As used herein, the term “Cpf1” should be broadly construed to include both naturally occurring Cpf1 polypeptides, as well as mutated/chimeric variants thereof. In some embodiments, the present disclosure teaches methods of cleaving target DNA via targeted Cpf1 complexes, and then ligating the resulting sticky ends with DNA inserts. In some embodiments, the present disclosure teaches methods of providing a Cpf1 complex to cleave the target DNA, and a ligase to “sew” the DNA back together. In other embodiments, the present disclosure teaches modified Cpf1 complexes that include a tethered ligase enzyme.

[0122] Ligases

[0123] As used herein, the term “ligase” can comprise any number of enzymatic or non-enzymatic reagents. For example, ligase is an enzymatic ligation reagent or catalyst that, under appropriate conditions, forms phosphodiester bonds between the 3′-OH and the 5′-phosphate of adjacent nucleotides in DNA molecules, RNA molecules, or hybrids.

[0124] In some embodiments, the present disclosure teaches the use of enzymatic ligases. Compatible temperature sensitive enzymatic ligases, include, but are not limited to, bacteriophage T4 ligase, T7 ligase, and E. coli ligase. Thermostable ligases include, but are not limited to, Afu ligase, Taq ligase, Tfl ligase, Tth ligase, Tth HB8 ligase, Thermus species AK16D ligase and Pfu ligase (see for example Published P.C.T. Application WO/2000/026381, Wu et al., Gene, 76(2):245-254, (1989), and Luo et al., Nucleic Acids Research, 24(15): 3071-3078 (1996)). The skilled artisan will appreciate that any number of thermostable ligases can be obtained from thermophilic or hyperthermophilic organisms, for example, certain species of eubacteria and archaea; and that such ligases can be employed in the disclosed methods and kits. In some embodiments, reversibly inactivated enzymes (see for example U.S. Pat. No. 5,773,258) can be employed in some embodiments of the present teachings.

[0125] In other embodiments, the present disclosure teaches the use of chemical ligation agents. Chemical ligation agents include, without limitation, activating, condensing, and reducing agents, such as carbodiimide, cyanogen bromide (BrCN), N-cyanoimidazole, imidazole, 1-methylimidazole/carbodiimide/cystamine, dithiothreitol (DTT) and ultraviolet light. Autoligation, i.e., spontaneous ligation in the absence of a ligating agent, is also within the scope of the teachings herein. Detailed protocols for chemical ligation methods and descriptions of appropriate reactive groups can be found in, among other places, Xu et al., Nucleic Acid Res., 27:875-81 (1999); Gryaznov and Letsinger, Nucleic Acid Res. 21:1403-08 (1993); Gryaznov et al., Nucleic Acid Res. 22:2366-69 (1994); Kanaya and Yanagawa, Biochemistry 25:7423-30 (1986); Luebke and Dervan, Nucleic Acids Res. 20:3005-09 (1992); Sievers and von Kiedrowski, Nature 369:221-24 (1994); Liu and Taylor, Nucleic Acids Res. 26:3300-04 (1999); Wang and Kool, Nucleic Acids Res. 22:2326-33 (1994); Purmal et al., Nucleic Acids Res. 20:3713-19 (1992); Ashley and Kushlan, Biochemistry 30:2927-33 (1991); Chu and Orgel, Nucleic Acids Res. 16:3671-91 (1988); Sokolova et al., FEBS Letters 232:153-55 (1988); Naylor and Gilham, Biochemistry 5:2722-28 (1966); and U.S. Pat. No. 5,476,930.

[0126] In some embodiments, the methods, kits and compositions of the present disclosure are also compatible with photoligation reactions. Photoligation using light of an appropriate wavelength as a ligation agent is also within the scope of the teachings. In some embodiments, photoligation comprises probes comprising nucleotide analogs, including but not limited to, 4-thiothymidine, 5-vinyluracil and its derivatives, or combinations thereof. In some embodiments, the ligation agent comprises: (a) light in the UV-A range (about 320 nm to about 400 nm), the UV-B range (about 290 nm to about 320 nm), or combinations thereof, (b) light with a wavelength between about 300 nm and about 375 nm, (c) light with a wavelength of about 360 nm to about 370 nm; (d) light with a wavelength of about 364 nm to about 368 nm, or (e) light with a wavelength of about 366 nm. In some embodiments, photoligation is reversible. Descriptions of photoligation can be found in, among other places, Fujimoto et al., Nucl. Acid Symp. Ser. 42:39-40 (1999); Fujimoto et al., Nucl. Acid Res. Suppl. 1:185-86 (2001); Fujimoto et al., Nucl. Acid Suppl., 2:155-56 (2002); Liu and Taylor, Nucl. Acid Res. 26:3300-04 (1998) and on the world wide web at: sbchem.kyoto-u.ac.jp/saito-lab.

[0127] Chimeric CRISPR Polypetides (e.g. Cpf1-Ligase Polypeptides).

[0128] In some embodiments, the present disclosure teaches fusing a Cpf1 or other CRISPR polypeptide with a polypeptide with ligase activity. In some embodiments, ligases fused to Cpf1 complexes are enzymatic ligases. Methods for creating chimeric fusions are well-known in the art, and are discussed in Sambrook et al. (2001) Molecular Cloning: A Laboratory Manual (3rd ed., Cold Spring Harbor Laboratory Press, Plainview, N.Y.).

[0129] In some embodiments, a linker is used to genetically fuse an enzymatic ligase to a Cpf1 or other Targetable Enzyme gene to create an engineered, non-naturally occurring protein. In some embodiments, units are linked using a chemical compound. In some embodiments, the linker is an inorganic compound. In some embodiments, the linker is an organic compound. In some embodiments, the linker is a hybrid organic and inorganic compound.

[0130] In some embodiments, the linker is covalently bonded to Cpf1 or other Targetable Enzyme and the ligase. In some embodiments, the genes are genetically fused. In some embodiments, the linker is translationally fused to Cpf1 or other Targetable Enzyme and the ligase. In some embodiments, linkage occurs from about the 3′ end of Cpf1 sequence to about the 5′ end of the ligase sequence. In some embodiments, linkage occurs from about the 3′ end of the ligase sequence to about the 5′ prime end of Cpf1 or other Targetable Enzyme. In some embodiments, the linker is included within the open reading frame. In some embodiments, linkage occurs at any suitable position on Cpf1 or other Targetable Enzyme.

[0131] In some embodiments, the linker is an amino acid sequence. In some embodiments, the amino acids of the linker can include one or more amino acids selected from the group consisting of: glycine, alanine, serine, threonine, cysteine, valine, leucine, isoleucine, methionine, proline, phenylalanine, tyrosine, tryptophan, aspartic acid, glutamic acid, asparagine, glutamine, histidine, lysine, arginine, and/or combinations thereof. In some embodiments, the linker amino acid sequence is fused to Cpf1 or other Targetable Enzyme and the ligase.

[0132] As discussed in earlier sections, some embodiments of the present disclosure teach methods of creating other Cpf1 or Cas9 chimeric fusion proteins. That is, in some embodiments, the present disclosure teaches Cpf1 and/or Cas9 proteins translationally fused to one or more DNA nuclease domains capable of producing DNA cuts with 3′ or 5′ overhangs. In some embodiments, these synthetically produced CRISPR fusions with DNA nucleases are referred to as Targetable Enzymes.

[0133] Fusion of protein subunits of a complex has been performed on other systems and can be accomplished with the constructs disclosed herein by one skilled in the art with knowledge of the nucleic acid sequences to be fused to the Cas9 or Cpf1. Examples of genetic fusion of proteins using an amino acid sequence include the following, which are herein incorporated by reference in their entirety: (1) Martin, A. et al. Nature 2005 Oct. 20; 437:1115-1120); (2) Wang, F. et al. Nature 2014 Aug. 28; 512:441-444; (3) Schmitz, K. R. and Sauer, R. T. Molecular Microbiology. 2014 Jul. 13; 93(4):617-628; (4) Wang, Q. et al. Chem. Commun. 2014 Mar. 3; 50:4299-4301; (5) Andre, C. et al. S. PNAS. 2013 Feb. 19, 110(8):3191-3196; (7) Weidle, U. H. et al. Cancer Genomics and Proteomics. 2012 9(6):357-372).

[0134] Examples of fusing an exogenous active domain to a separate protein to create a construct with activities of both units include the following, which is herein incorporated by reference: Wa, F. US. Pat. Pub. No. 20140273226. 2014 Sep. 18.

[0135] In some embodiments, the linker includes about 1, 2, 3, 4, 5, 6, 7, 8, 9, 10, 11, 12, 13, 14, 15, 16, 17, 18, 19, 20, 21, 22, 23, 24, 25, 26, 27, 28, 29, 30, 31, 32, 33, 34, 35, 36, 37, 38, 39, 40, 41, 42, 43, 44, 45, 46, 47, 48, 49, 50, 51, 52, 53, 54, 55, 56, 57, 58, 59, 60, 61, 62, 63, 64, 65, 66, 67, 68, 69, 70, 71, 72, 73, 74, 75, 76, 77, 78, 79, 80, 81, 82, 83, 84, 85, 86, 87, 88, 89, 90, 91, 92, 93, 94, 95, 96, 97, 98, 99, 100, 101, 102, 103, 104, 105, 106, 107, 108, 109, 110, 111, 112, 113, 114, 115, 116, 117, 118, 119, 120, 121, 122, 123, 124, 125, 126, 127, 128, 129, 130, 131, 132, 133, 134, 135, 136, 137, 138, 139, 140, 141, 142, 143, 144, 145, 146, 147, 148, 149, 150, 151, 152, 153, 154, 155, 156, 157, 158, 159, 160, 161, 162, 163, 164, 165, 166, 167, 168, 169, 170, 171, 172, 173, 174, 175, 176, 177, 178, 179, 180, 181, 182, 183, 184, 185, 186, 187, 188, 189, 190, 191, 192, 193, 194, 195, 196, 197, 198, 199, 200, 201, 202, 203, 204, 205, 206, 207, 208, 209, 210, 211, 212, 213, 214, 215, 216, 217, 218, 219, 220, 221, 222, 223, 224, 225, 226, 227, 228, 229, 230, 231, 232, 233, 234, 235, 236, 237, 238, 239, 240, 241, 242, 243, 244, 245, 246, 247, 248, 249, 250, 251, 252, 253, 254, 255, 256, 257, 258, 259, 260, 261, 262, 263, 264, 265, 266, 267, 268, 269, 270, 271, 272, 273, 274, 275, 276, 277, 278, 279, 280, 281, 282, 283, 284, 285, 286, 287, 288, 289, 290, 291, 292, 293, 294, 295, 296, 297, 298, 299, or 300 amino acids, and all ranges and subranges there between.

[0136] Nuclear Localization Signal (NLS)

[0137] In some embodiments, viable genome-editing tools must be delivered to the nucleus of eukaryotic cells. In other embodiments, the complexes of the present disclosure must be delivered to organelles with genetic information (e.g., chloroplasts and/or mitochondria). In yet other embodiments, the genome-editing tools of the present disclosure are used in organisms without nuclei. Thus, in some embodiments, the present disclosure teaches chimeric Cpf1 polypeptides comprising one or more nuclear localization signals. A nuclear localization signal or sequence (NLS) is an amino acid sequence that ‘tags’ a protein for import into the cell nucleus by nuclear transport. In some embodiments, this signal consists of one or more short sequences of positively charged lysines or arginines exposed on the protein surface. Clusters of arginines or lysines in nucleus-targeted proteins signal the anchoring of these proteins to specialized transporter molecules found on the complex or in the cytoplasm. In some embodiments, one or more NLS can be genetically linked to one or more of the polypeptides disclosed herein. In some embodiments, the NLS is genetically linked to a Cpf1 protein. In some embodiments, the NLS is included within the open reading frame of the Cpf1 gene. In some embodiments, the NLS is genetically linked to the C-terminus and/or the N-terminus of a Cpf1 protein. In some embodiments, the NLS is included in the linker sequence connecting a Cpf1 protein to a fused protein or portion thereof (e.g., linker between Cpf1 and ligase).

[0138] The NLS can be, for example, one or more short sequences of positively charged lysines or arginines exposed on the protein surface; can be either monopartite or bipartite; can be either classical or nonclassical NLSs. Suitable NLSs can be, for example, a PY-NLS motif; PKKKRKV (SEQ ID NO:23); the acidic M9 domain of hnRNP A1, the sequence KIPIK (SEQ ID NO:24) of the yeast transcription repressor Matα2, the complex signals of U snRNPs, the RKRRR (SEQ ID NO:25) motif from Notch 1 protein, the KRKRK (SEQ ID NO:26) from Notch 2 protein, the RRKR (SEQ ID NO:27) motif from Notch3 protein, the RRRRR (SEQ ID NO: 28) motif from Notch4 protein, and any other NLSs from any nuclear proteins known or later discovered by those skilled in the art.

### CRISPR and Ligase Cloning and Gene Editing

[0139] In some embodiments, the present disclosure teaches a CRISPR and Ligase Cloning method (termed “CLIC”). CLIC is a method for DNA assembly that relies on the CRISPR nuclease Cpf1 to digest DNA molecules, leaving behind three-five base-pair sticky ends whose sequence can be selected by the user. These sticky ends are then ligated together with a DNA ligase in order to join two or more digested fragments into a fully assembled construct or genome. Due to the long (˜18 bp) and programmable recognition sequences of Cpf1, CLIC eliminates the requirement to remove restriction enzyme recognition sites from the DNA molecules being assembled. In some embodiments, CLIC can be performed either in vitro for the scarless assembly of many DNA parts simultaneously or in vivo for the site-specific insertion or deletion of one or more DNA molecules into the host genome.

[0140] Table 1 below summarizes many of the advantages of the CLIC methods of the present disclosure over existing cloning and gene editing techniques.

TABLE 1
Comparison of CLIC to existing cloning and gene editing techniques.

| | | Golden Gate | Yeast | Gibson |
|---|---|---|---|---|
| | CLIC | Assembly | Assembly | Assembly |
| Scarless | + | + | + | + |
| Multipart | + | + | + | + |
| One-pot reaction | + | + | − | + |
| (i.e. fast and easy) | | | | |
| PCR amplification of | + | + | − | − |
| parts optional | | | | |
| (i.e. cheap) | | | | |
| Amenable to large library | + | + | − | − |
| construction | | | | |
| Suitable for repetitive | + | + | − | − |
| sequences | | | | |
| No sequence constraints | + | − | + | + |
| (e.g. restriction sites) | | | | |

[0141] In Vitro Sequence Editing with Cpf1

[0142] Many technologies exist for multipart DNA assembly. In some embodiments, the present disclosure teaches Golden Gate-styled modular cloning methods. The general principle of Golden Gate cloning is based on the special ability of type IIS restriction enzymes to cleave outside of their recognition site to create compatible sticky ends. When type IIS recognition sites are placed to the far 5′ and 3′ end of any DNA fragment in inverse orientation, they are removed in the cleavage process, allowing two DNA fragments flanked by compatible sequence overhangs to be ligated seamlessly in the same reaction (see for example, Engler, C., Gruetzner, R., Kandzia, R. & Marillonnet, S. “Golden gate shuffling: a one-pot DNA shuffling method based on type IIs restriction enzymes.” PLoS ONE 4, e5553 (2009); Weber, E., Engler, C., Gruetzner, R., Werner, S. & Marillonnet, S. “A Modular Cloning System for Standardized Assembly of Multigene Constructs.” PLoS ONE 6, e16765 (2011); and Chesnet, J., Dudas, M., Harris, A., Leong, L. & Madden, K. “Methods and compositions for seamless cloning of nucleic acid molecules.” Issued as U.S. Pat. No. 8,338,091).

[0143] Traditional Golden Gate techniques however, face several important cloning speed and compatibility limitations. Most type IIS restriction enzymes rely on short ˜5-7 bp unique recognition sequences to direct their DNA cleavage. The uniqueness of each enzyme's recognition sequence limits the compatibility between enzymes and cloning vectors, each of which must be engineered to include an in-frame restriction site for every planned enzyme.

[0144] Moreover, the shortness of the recognition sequences for the restriction enzymes increases the likelihood that cloned sequences will be inadvertently cleaved by the accidental presence of a restriction site within its sequence. The need to alternate enzymes and vectors to accommodate for the type IIS limitations described above is a particularly relevant consideration during high throughput operations, where one size fits all tools are normally preferred.

[0145] In some embodiments, the present disclosure overcomes the limitations of traditional Golden Gate cloning methods by teaching the CLIC modular cloning techniques using the Cpf1 CRISPR system. CLIC shares all of the benefits of Golden Gate Assembly, while eliminating the burdensome sequence constraints since the use of a CRISPR nuclease results in long (i.e. very rare) and programmable recognition sequences.

[0146] In some embodiments, the CLIC Cpf1 cloning methods of the present disclosure do not require any engineering of the DNA sequence inserts. In some embodiments, the Cpf1 cloning methods of the present disclosure produce scarless DNA assemblies.

[0147] FIG. 2 depicts an embodiment of the CLIC methods of the present disclosure. In the figure, crRNA targeting polynucleotides are designed to bind in inverse orientation to the inner portion of a DNA insert region slated for deletion (e.g., a Multi Clonal Site “MCS”) so as to cleave towards the outside of the removed DNA fragment. Separate crRNA targeting polynucleotides are also designed to target the outer ends of DNA inserts (e.g., a gene of interest “GOI”), so as to remove the DNA binding sites during the reaction. In some embodiments, the crRNA guide sequences can be the same.

[0148] Designing the crRNA binding sites in inverse orientation, ensures that the sites are removed in the cleavage process, allowing two DNA fragments flanked by compatible sequence overhangs to be ligated seamlessly in the same reaction.

[0149] Compatible sticky ends from the vectors hybridize with their corresponding sticky ends in the GOI DNA. Hybridized DNA is then ligated using a ligase or other ligation method (e.g. chemical ligation).

[0150] In some embodiments, the crRNAs of the present disclosure are custom designed for each cleavage reaction. In other embodiments, standard crRNAs are designed to be reused with specific vectors and/or inserts.

[0151] In other embodiments, the CLIC techniques of the present disclosure can be used for multi-fragment cloning. For example, FIG. 3 of the specification depicts another embodiment of the CLIC cloning methods of the present disclosure. In this figure, crRNA targeting polynucleotides are designed to target the outer ends of various GOI fragments derived from circular plasmids, or linear DNA. Each GOI DNA insert is cleaved, so as to produce a 3′ sticky end that is compatible with the 5′ end of another GOI insert. The compatible sticky ends of each GOI insert are allowed to hybridize to assemble into the final DNA molecule. Assembled DNA is ligated in the same reaction as the Cpf1 cleavage.

[0152] In some embodiments, the in vitro methods of the present disclosure are carried out by mixing previously synthesized plasmids, crRNAs, insert oligos, and Cpf1 protein.

[0153] In Vivo Sequence Editing Using Cpf1

[0154] In some embodiments, the present disclosure also teaches CLIC Cpf1 mediated methods of in vivo gene editing. In some embodiments, the CRISPR Cpf1 in vivo gene editing methods of the present disclosure do not require the presence of HDR mechanisms.

[0155] Existing techniques for targeted genome editing with CRISPR/Cas9 rely on the cell's native ability to repair double strand breaks via homologous recombination (Dicarlo, J. E. et al. “Genome engineering in Saccharomyces cerevisiae using CRISPR-Cas systems.” Nucleic Acids Res (2013). doi:10.1093/nar/gkt135). In organisms with low rates of homologous recombination, genome editing with CRISPR/Cas9 is often inefficient.

[0156] In some embodiments, CLIC gets around the aforementioned problem by supplying both the machinery for generating a double strand break at a specific location in the genome (CRISPR/Cpf1) and the machinery for repairing that double strand break in a controlled manner (DNA ligase) (see Zetsche, B. et al. 2015. “Cpf1 Is a Single RNA-Guided Endonuclease of a Class 2 CRISPR-Cas System” Cell 163, 759-771).

[0157] FIG. 4 of the specification depicts several embodiments of the in vivo cloning methods of the present disclosure. In some embodiments, the present disclosure teaches methods of deleting unwanted DNA regions from the genomes of engineered organisms. This process comprises targeting two Cpf1 endonucleases to locations immediately flanking the DNA region slated for deletion. The Cpf1 target sites are, in some embodiments, targeted to the inner portions of the DNA slated for deletion in an inverse orientation, such that the Cpf1 binding sites are removed by the cleavage of the target fragment. In some embodiments, the remaining sticky ends of the genomic DNA fragments created by the Cpf1 cleavage are compatible with each other, and can hybridize to each other to close the gap in the genomic DNA (FIG. 4A).

[0158] In other embodiments, the remaining sticky ends of the genomic DNA are compatible with the ends of a designed insert (FIG. 4B). In some embodiments, the sticky ends of the designed insert are produced by endonuclease reactions in vivo (e.g., via Cpf1 targeted digestions of the oligo ends within the cell). In other embodiments, the designed oligos are provided to the cell with pre-existing sticky ends (see FIG. 4C top insert fragment).

[0159] One particular embodiment of the present disclosure teaches sourcing the designed insert from an episomal plasmid in the organism (FIG. 4C). In some embodiments, the designed insert is released from the episomal plasmid by Cpf1-mediated endonuclease cleavage. In some embodiments, the episomal plasmid is designed such that removal of the designed insert reconstitutes a marker gene. Thus in some embodiment, the cells undergoing gene editing of the present disclosure can be identified by the expression of one or more marker genes.

[0160] FIG. 5 of the specification depicts a CLIC method of multi-part cloning assembly in vitro or in vivo. In this figure, a vector or genome is cleaved with a Cpf1 endonuclease to create two sticky ends with distinct 5 nt overhangs a′ and c′ (FIG. 5A, top). Insert plasmids or linear PCR oligos are similarly digested by Cpf1 complexes to produce sticky ends with overhangs a′ and b′ for the Part A insert, and sticky ends with overhangs b′ and c′ for the Part B insert (FIG. 5A, top). The 3′ sticky end a′ from the vector or genome hybridizes with the compatible 5′ sticky end a′ from the Part A insert. The 3′ sticky end b′ of the Part A insert similarly hybridizes with the 5′ sticky end b′ of the Part B insert. Finally, the 3′ sticky end c′ of the Part B insert hybridizes with the 5′ c′ sticky end of the vector or genome, and the reconstituted DNA is ligated with a DNA ligase.

[0161] FIG. 5B depicts the crRNA and target sequences for the center cut of the CLIC example of FIG. 5A (see dotted lines). In this example, the crRNA sequence (SEQ ID No. 31) contains the guide sequence responsible for binding to the Part A or Part B vector, adjacent to the appropriate PAM (FIG. 5B, Top). An example sequence for the target DNA regions is provided as SEQ ID No. 32 and 33). The resulting cut creates 3′ and 5′ sticky ends for the Part A and Part B inserts respectively, with 5 nt 3′overhangs. These sequences for these sticky ends are provided as SEQ ID Nos. 34 and 35 (FIG. 5B, Middle). The resulting sticky ends hybridize according to the overhanging sequence and are ligated together (FIG. 5B, Bottom). Sequence for the ligated product provided as SEQ ID. No. 36.

[0162] In some embodiments, designed inserts of the present disclosure comprise inverted repeat sequences for looping out unwanted DNA as described in other portions of this specification. Thus, in some embodiments, the present disclosure teaches methods of inserting designed inserts into genomic regions with one or more selection markers, wherein said selection markers can later be looped out according to the methods of the present disclosure.

[0163] A person having skill in the art will recognize that the CLIC methods for in vivo genome editing of the present disclosure proceeds in much the same was as was described for the in vitro DNA assembly, except that genomic DNA takes the place of vector DNA as the recipient of the part(s) being assembled.

### Transposon-Removal Via Cpf1

[0164] In some embodiments, the present disclosure teaches methods of inactivating transposons in certain organisms. Multiple copies of the same transposon-like sequences often exist in production host organisms. These elements are known to copy and paste themselves at random integration sites throughout the genome. This is an undesirable cause of instability in production host strains, which can negatively impact strain performance and process economics. Since all copies of these elements in a genome have nearly identical sequences, they can be removed using common crRNA sequences and the editing-by-ligation strategy described above.

[0165] Thus, in some embodiments, the present disclosure teaches methods of designing and using crRNA oligos targeting one or more transposon or transposon-like sequences. In some embodiments, Cpf1 endonucleases are targeted to sequences within the transposon in inverse orientation, such that the Cpf1 binding sites are removed with the deletion of the transposon. In some embodiments, the remaining sticky ends of the cleaved genome are compatible, so as to be able to hybridize to each other and close the DNA gap.

[0166] In some embodiments, the methods of the present disclosure comprise ligating all the compatible hybridized sticky ends produced according to the Cpf1 digestions disclosed herein.

### Expression, Purification, and Delivery

[0167] In some embodiments, the present disclosure teaches methods and compositions of vectors, constructs, and nucleic acid sequences encoding the gene editing complexes of the present disclosure. In some embodiments, the present disclosure teaches plasmids or other constructs for transgenic or transient expression of the Cpf1 protein.

[0168] In some embodiments, the present disclosure teaches a plasmid encoding a chimeric Cpf1 protein comprising in-frame sequences for protein fusions of one or more of the other polypeptides described herein, including, but not limited to a ligase, a linker, and an NLS.

[0169] In some embodiments, the plasmids and vectors of the present disclosure will encode for the Cpf1 protein(s) and also encode the crRNA, and/or donor insert sequences of the present disclosure. In other embodiments, the different components of the engineered complex can be encoded in one or more distinct plasmids. In some embodiments, the present disclosure teaches extrachromosomal expression of one or more of the CLIC components. That is, in some embodiments, the present disclosure teaches extra chromosomal expression of the Cpf1 protein. In some embodiments, the present disclosure teaches extra chromosomal expression of the one or more crRNAs/guide RNAs.

[0170] In some embodiments, the plasmids/constructs of the present disclosure can be used across multiple species. In other embodiments, the plasmids/constructs of the present disclosure are tailored to the organism being transformed. In some embodiments, the sequences of the present disclosure will be codon-optimized to express in the organism whose genes are being edited. Persons having skill in the art will recognize the importance of using promoters providing adequate expression for gene editing. In some embodiments, the plasmids for different species will require different promoters.

[0171] In some embodiments, the plasmids and vectors of the present disclosure are selectively expressed in the cells of interest. Thus in some embodiments, the present application teaches the use of ectopic promoters, tissue-specific promoters, developmentally-regulated promoters, or inducible promoters. In some embodiments, the present disclosure also teaches the use of terminator sequences.

[0172] Persons skilled in the art will immediately recognize that all disclosed methods of expressing Cpf1 endonuclease is equally applicable to other CRISPR endonucleases or Targetable Enzymes.

### Transformation

[0173] In some embodiments, the present disclosure teaches the use of transformation of the plasmids and vectors disclosed herein. Persons having skill in the art will recognize that the plasmids of the present disclosure can be transformed into cells through any known system as described in other portions of this specification. For example, in some embodiments, the present disclosure teaches transformation by particle bombardment, chemical transformation, agrobacterium transformation, nano-spike transformation, and virus transformation.

[0174] In some embodiments, the vectors of the present disclosure may be introduced into the host cells using any of a variety of techniques, including transformation, transfection, transduction, viral infection, gene guns, or Ti-mediated gene transfer. Particular methods include calcium phosphate transfection, DEAE-Dextran mediated transfection, lipofection, or electroporation (Davis, L., Dibner, M., Battey, I., 1986 “Basic Methods in Molecular Biology”). Other methods of transformation include for example, lithium acetate transformation and electroporation See, e.g., Gietz et al., Nucleic Acids Res. 27:69-74 (1992); Ito et al., J. Bacterol. 153:163-168 (1983); and Becker and Guarente, Methods in Enzymology 194:182-187 (1991). In some embodiments, transformed host cells are referred to as recombinant host strains.

[0175] In some embodiments, the present disclosure teaches high throughput transformation of cells using the 96-well plate robotics platform and liquid handling machines of the present disclosure.

[0176] In some embodiments, the present disclosure teaches methods for getting exogenous protein (Cpf1 and DNA ligase), RNA (crRNA), and DNA (target DNA to be ligated into the genome) into the cell are required. Various methods for achieving this have been described previously including direct transfection of protein/RNA/DNA or DNA transformation followed by intracellular expression of RNA and protein (Dicarlo, J. E. et al. “Genome engineering in Saccharomyces cerevisiae using CRISPR-Cas systems.” Nucleic Acids Res (2013). doi:10.1093/nar/gkt135; Ren, Z. J., Baumann, R. G. & Black, L. W. “Cloning of linear DNAs in vivo by overexpressed T4 DNA ligase: construction of a T4 phage hoc gene display vector.” Gene 195, 303-311 (1997); Lin, S., Staahl, B. T., Alla, R. K. & Doudna, J. A. “Enhanced homology-directed human genome engineering by controlled timing of CRISPR/Cas9 delivery.” Elife 3, e04766 (2014)).

[0177] In some embodiments, the present disclosure teaches screening transformed cells with one or more selection markers as described above. In one such embodiment, cells transformed with a vector comprising a kanamycin resistance marker (KanR) are plated on media containing effective amounts of the kanamycin antibiotic. Colony forming units visible on kanamycin-laced media are presumed to have incorporated the vector cassette into their genome. Insertion of the desired sequences can be confirmed via PCR, restriction enzyme analysis, and/or sequencing of the relevant insertion site.

[0178] In other embodiments, a portion, or the entire complexes of the present disclosure can be delivered directly to cells. Thus, in some embodiments, the present disclosure teaches the expression and purification of the polypeptides and nucleic acids of the present disclosure. Persons having skill in the art will recognize the many ways to purify protein and nucleic acids. In some embodiments, the polypeptides can be expressed via inducible or constitutive protein production systems such as the bacterial system, yeast system, plant cell system, or animal cell systems. In some embodiments, the present disclosure also teaches the purification of proteins and or polypeptides via affinity tags, or custom antibody purifications. In other embodiments, the present disclosure also teaches methods of chemical synthesis for polynucleotides.

[0179] In some embodiments, persons having skill in the art will recognize that viral vectors or plasmids for gene expression can be used to deliver the complexes disclosed herein. Virus-like particles (VLP) can be used to encapsulate ribonucleoprotein complexes or recombinant expression, and purified ribonucleoprotein complexes disclosed herein can be purified and delivered to cells via electroporation or injection.

[0180] Persons skilled in the art will immediately recognize that the aforementioned references to vectors encoding for Cpf1 endonucleases are equally applicable to other CRISPR endonucleases or Targetable Enzymes.

### Target Sequence Selection Algorithm

[0181] In some embodiments, the present disclosure teaches algorithms designed to facilitate CRISPR target selections. In some embodiments, the software program is designed to identify candidate CRISPR target sequences on both strands of an input DNA sequence based on desired guide sequence length and a CRISPR motif sequence (PAM, protospacer adjacent motif) for a specified CRISPR enzyme. For example, target sites for Cpf1 from Francisella novicida U112, with PAM sequences TTN, may be identified by searching for 5′-TTN-3′ both on the input sequence and on the reverse-complement of the input. The target sites for Cpf1 from Lachnospiraceae bacterium and Acidaminococcus sp., with PAM sequences TTTN, may be identified by searching for 5′-TTTN-3′ both on the input sequence and on the reverse complement of the input. Likewise, target sites for Cas9 of S. thermophilus CRISPR1, with PAM sequence NNAGAAW, may be identified by searching for 5′-Nx-NNAGAAW-3′ both on the input sequence and on the reverse-complement of the input. Likewise, target sites for Cas9 of S. thermophilus CRISPR, with PAM sequence NGGNG, may be identified by searching for 5′-N, NGGNG-3′ both on the input sequence and on the reverse-complement of the input. The value “x” in Nx may be fixed by the program or specified by the user, such as 20.

[0182] In some embodiments, the algorithms of the present disclosure further facilitate the identification of compatible Cpf1 sites within open reading frames (ORFs). For example, in some embodiments, the for example, the algorithms of the present disclosure can be used to identify viable Cpf1 sites that when combined with a second site will generate compatible overhangs for enabling ligation, thereby excluding part, or the whole of the ORF

[0183] Since multiple occurrences in the genome of the DNA target site may lead to nonspecific genome editing, after identifying all potential sites, the present disclosure teaches filtering out sequences based on the number of times they appear in the relevant reference genome. For those CRISPR enzymes for which sequence specificity is determined by a ‘seed’ sequence (such as the first 5 bp of the guide sequence for Cpf1-mediated cleavage) the filtering step may also account for any seed sequence limitations.

[0184] In some embodiments, algorithmic tools can also identify potential off target sites for a particular guide sequence. For example in some embodiments Cas-Offinder can be used to identify potential off target sites for Cpf1 (see Kim et al., 2016. “Genome-wide analysis reveals specificities of Cpf1 endonucleases in human cells” published online Jun. 6, 2016).

[0185] In some embodiments, the user may be allowed to choose the length of the seed sequence. The user may also be allowed to specify the number of occurrences of the seed:PAM sequence in a genome for purposes of passing the filter. The default is to screen for unique sequences. Filtration level is altered by changing both the length of the seed sequence and the number of occurrences of the sequence in the genome. The program may in addition or alternatively provide the sequence of a guide sequence complementary to the reported target sequence(s) by providing the reverse complement of the identified target sequence(s).

[0186] Persons having skill in the art would similarly be able to identify target sites for Target Enzymes of the present disclosure.

### Kits

[0187] In some embodiments, the disclosure provides kits containing any one or more of the elements disclosed in the above methods and compositions. In some embodiments, the kit comprises a vector system and instructions for using the kit. In some embodiments, the vector system comprises (a) a first regulatory element operably linked to a polynucleotide encoding for a crRNA/guide RNA sequence, said polynucleotide comprising one or more insertion sites for inserting a desired guide sequence downstream of the loop portion of the crRNA, wherein when expressed, the crRNA sequence directs sequence-specific binding of a CRISPR Cpf1 complex to a target sequence in an engineered cell. In some embodiments, the vector system further contains a (b) second regulatory element operably linked to an enzyme-coding sequence encoding a CRISPR Cpf1 enzyme. In some embodiments, the vectors system further comprises a (c) third regulatory element operably linked to a polynucleotide encoding a functional ligase. In some embodiments, the CRISPR Cpf1 endonuclease of the kit is a chimeric Cpf1 comprising an NLS, and/or a ligase as described above.

[0188] Elements may be provided individually or in combinations, and may be provided in any suitable container, such as a vial, a bottle, or a tube. In some embodiments, the kit includes instructions in one or more languages, for example in more than one language.

[0189] In some embodiments, a kit comprises one or more reagents for use in a process utilizing one or more of the elements described herein (e.g., purified Cpf1 endonuclease). Reagents may be provided in any suitable container. For example, a kit may provide one or more reaction or storage buffers. Reagents may be provided in a form that is usable in a particular assay, or in a form that requires addition of one or more other components before use (e.g. in concentrate or lyophilized form). A buffer can be any buffer, including but not limited to a sodium carbonate buffer, a sodium bicarbonate buffer, a borate buffer, a Tris buffer, a MOPS buffer, a HEPES buffer, and combinations thereof. In some embodiments, the buffer is alkaline. In some embodiments, the buffer has a pH from about 7 to about 10. In some embodiments, the kit comprises one or more oligonucleotides corresponding to a crRNA sequence for insertion into a vector so as to operably link the crRNA sequence and a regulatory element.

[0190] Persons skilled in the art will immediately recognize that the aforementioned disclosure of kits comprising Cpf1 endonuclease are equally applicable to other CRISPR endonucleases or Targetable Enzymes.

### EXAMPLES

[0191] The following examples are given for the purpose of illustrating various embodiments of the disclosure and are not meant to limit the present disclosure in any fashion. Changes therein and other uses which are encompassed within the spirit of the disclosure, as defined by the scope of the claims, will occur to those skilled in the art.

### Example 1: Production of Purified Cpf1 Protein

[0192] Cpf1 protein was purified from bacterial cultures for use in future in vitro CLIC reactions. The coding sequence for the FnCpf1 was cloned into a standard bacterial expression pD454-HMBp based backbone vector (pUC ori. AmpR, T7 promoter (IPTG inducible, His-tag. MBP fusion, TEV protease cleavage site) and was transformed into a E. coli BL21(DE3) protein production host. The transformed cultures were grown in standard bacterial media and were induced with IPTG. Cultures were then lysed, and the resulting protein extractions were nickel purified, followed by the removal of tags with TEV protease.

[0193] Purified Cpf1 protein was visualized in a SDS-PAGE gel to confirm purity (see lane 2 in FIG. 8). Cpf1 protein concentration was determined via standard Bradford Assay quantification methods (see FIG. 9).

### Example 2: Cpf1 Mediated Digestion and Ligation

[0194] Purified Cpf1 enzyme from Example 1 was incubated with a 1956 bp PCR fragment and a crRNA to test for Cpf1-mediated digestion. The 1956 bp PCR sequence for the reaction was derived from a PCR an amplification of pWD031 plasmid, resulting in a PCR product as disclosed in SEQ ID NO. 79. The crRNA was derived from an in vitro transcription of a linear DNA template using a T7 HiScribe® RNA synthesis kit, resulting in a crRNA with the sequence disclosed in SEQ ID NO. 85.

[0195] The crRNA sequence was designed such that successful Cpf1 cleavage of the 1956 bp PCR fragment would result in a 1500 bp and a 500 bp fragment (SEQ ID NO. 84, and SEQ ID NO. 83, respectively). A first reaction was allowed to digest the PCR fragment for 20 minutes at 37 degrees Celsius to confirm Cpf1 activity. A second reaction was allowed to digest the PCR fragment for 20 minutes at 37 Celsius, followed by a heat inactivation of the Cpf1 enzyme, and a 2-hour incubation with T7 DNA ligase in T4 DNA ligase buffer at room temperature. The reactions were run on a standard agarose gel and the resulting DNA fragments were analyzed.

[0196] The Cpf1-digested reaction exhibited the expected 1500 bp and 500 bp fragments. The ligase-incubated reaction exhibited the digestion fragments, but also showed a significant band at 1956 bp, representing the re-ligated PCR product (FIG. 10).

### Example 3: CLIC In Vitro Single Pot Cloning with Cpf1-Fragment Ligation

[0197] In order to test Cpf1's ability to conduct single-pot in vitro DNA assembly, a two fragment digestion/ligation reaction was conducted. Two PCR products with sequences disclosed in SEQ ID No. 86 and 87 were combined in a Cpf1 reaction with a pre-synthesized crRNAs 1 and 3 with the sequence disclosed in SEQ ID No. 85 and 88.

[0198] The crRNA sequences were designed so as to direct the Cpf1 nuclease to the outer portions of the PCR products, such that the Cpf1 binding sites would be removed once the reaction was complete. The Cpf1 complex was thus designed to be in an inverse orientation to ensure that digested PCR products would cease to be Cpf1 substrates, and would thus be available for subsequent ligation steps of the experiment. The reaction also included a T7 ligase purchased from commercial vendors. A control reaction for this experiment omitted the ligase, but was otherwise identical. Both reactions were conducted using a T4 ligase buffer.

[0199] Rather than incubating the reaction at 37 degrees Celsius (the optimum temperature for the Cpf1 enzyme), the reaction was cycled between 37 Celsius for two minutes, and 20 Celsius (the optimum ligase temperature) for five minutes for 25 cycles to allow for ligase activity between bursts of digestion. The resulting products were run on a standard agarose gel with a DNA ladder.

[0200] FIG. 11 shows the resulting bands from the CLIC reaction. Control lane 1 included two bands corresponding to the digested ˜1300 bp and ˜1800 bp PCR fragments corresponding to digested SEQ ID NOs. 85 and 88. Ligase experimental lane 2 includes a visible band of ˜3000 bp, corresponding to the CLIC ligation of the two Cpf1 digested PCR products.

[0201] This experiment thus demonstrated the ability of Cpf1 to be used for single-pot CLIC cloning reactions.

### Example 4: In Vivo Cpf1 Cleavage

[0202] An in vivo CLIC digestion reaction was conducted, in order to validate Cpf1 endonuclease activity in living hosts. The Cpf1 coding sequence from Example 1 was re-cloned into a standard bacterial expression vector with the plasmid sequence as disclosed in SEQ ID No. 29. The Cpf1 expression vector further comprised a crRNA expression cassette with the targeting guide sequence disclosed in SEQ ID NO. 30 (shown in DNA form).

[0203] Two additional “resistance” plasmids were cloned, each containing a Kanamycin resistance marker. One of the resistance plasmids was designed to be a perfect Wild Type target for the crRNA of the Cpf1 plasmid (e.g. designed to have a validated CRISPR landing site for the CRISPR complex disclosed above). The second resistance plasmid contained a Mutant PAM designed to reduce Cpf1 cleavage of the target. Sequences for both resistance plasmids are disclosed as SEQ ID No. 80 (Wild Type PAM) and SEQ ID No. 81 (Mutant PAM).

[0204] E. coli cells were transformed with the cloned vectors according to four experimental treatments: 1) Wild Type PAM resistance vector, 2) Wild Type PAM resistance vector with the co-transformed Cpf1/crRNA vector, 3) Mutant PAM resistance vector, and 4) Mutant PAM resistance vector with the co-transformed Cpf1/crRNA vector. Transformed cells were plated on media containing the resistance selection marker, such that only cells comprising intact resistance plasmids would survive.

[0205] FIG. 12 depicts the results of the experiment. Cells from Treatment 2, transformed with both the Cpf1/crRNA vector and the Wild Type resistance plasmid showed a marked decrease in colony forming units compared to Treatment 1 plates containing only the Wild Type resistance plasmid. In contrast, cells from Treatment 4, transformed with both the Cpf1/crRNA vector and the Mutant Pam showed little difference in the number of colony forming units compared to Treatment 3 plates containing the Mutant PAM plasmid.

[0206] Cpf1 co-expression successfully targeted and disabled Wild Type resistance plasmids in vivo. This effect could be reversed as Cpf1 cleavage of target plasmids was thwarted by mutating the PAM sequence.

### Example 5: In Vivo Gene Editing with Cpf1

[0207] CLIC DNA assemblies will be validated in in vitro gene editing experiments. Briefly, engineered Escherichia coli strains chromosomally expressing either T4 or T7 ligase genes, and FnCpf1 genes will be transiently transformed with extrachromosomal plasmids expressing CRISPR arrays encoding crRNAs targeting various genes of interest. Initial gene targets will include (but will not necessarily be limited to) yhfS and upp.

[0208] The crRNAs for this example will be targeted to two compatible locations flanking each target gene, in order to induce a deletion a portion, or the entire gene ORF. The crRNAs would be further designed to position the Cpf1 endonuclease on either side of the gene ORF in an outwardly facing inverse orientation, according to the CLIC methods of the present disclosure. Control bacterium would include crRNAs designed to position the Cpf1 endonuclease such that one, or both of the crRNA target locations was oriented to face inward towards the deletion.

[0209] Transformed E. coli would be screened to determine deletion rates for the targeted gene. For example, disruption of the upp gene will be determined by screening for bacteria that becomes insensitive to 5-fluorouracil exposure.

[0210] Successful transformants will then be rehabilitated using CLIC in vivo DNA insertions. For example, bacteria with disrupted upp genes will be repaired by re-inserting the upp gene into the mutated locus, without the addition of any scars.

[0211] Briefly, malfunctioning E. coli strains will be transformed with extrachromosomal CRISPR arrays encoding crRNAs that are designed to position the Cpf1 endonuclease on either side of the disrupted ORF in an outwardly facing inverse orientation, according to the CLIC methods of the present disclosure. Control bacterium would include crRNAs designed to position the Cpf1 endonuclease such that one, or both of the crRNA target locations was oriented to face inward towards the deletion.

[0212] Insertion sequences will be provided as either pre-processed oligos with pre-existing staggered cuts (e.g., hybridized staggered oligos with protected ends, such as with phosphorothioate nucleotides), or could also be provided as linear or circular inserts sequences for in vivo processing. In the latter, the insert DNA will be designed to include the target sequences of one or both of the crRNAs targeted to the genome, except that the target sites will be oriented such that the Cpf1 endonuclease was oriented to face inward towards the insert in an inverse orientation.

[0213] Rehabilitated bacteria will be screened via similar methods as described above. For example, bacterial cultures will be exposed to ethionine to identify return to wild type sensitivity. Alternatively, the insert will also include a selection marker to facilitate screening.

### Example 6: Transposon Inactivation with Cpf1

[0214] Transposon inactivation methods of the present disclosure will also be validated as described in Example 6. Briefly, engineered Escherichia coli strains chromosomally expressing either T4 or T7 ligase genes, and FnCpf1 genes will be transiently transformed with extrachromosomal plasmids expressing CRISPR arrays encoding crRNAs targeting selected transposon sequences.

[0215] The crRNAs for this example will be targeted to two compatible locations flanking the selected transposon, in order to induce its deletion from the genome. Initial trials will target transposons with multiple copies with high sequence similarity. The crRNAs for this experiment would be further designed to position the Cpf1 endonuclease on either side of the transposon element in an outwardly facing inverse orientation, according to the CLIC methods of the present disclosure.

[0216] Successful events will be identified via PCR screens of selected transposon events, much like the identification of T-DNAs.

### Example 7: Identification of Additional Cpf1 Gene Homologs and Orthologs

[0217] The Cpf1 polypeptide sequence from Francisella tularensis subsp. Novicida U112 disclosed in SEQ ID NO: 7 was used to identify additional putative Cpf1 homologs and orthologs from other eukaryotic and prokaryotic organisms.

[0218] Briefly, the amino acid sequence of SEQ ID NO: 7 was used as the search string in the NCBI BLASTP® database to identify related sequences with high homology to the search gene. Searches were conducted with default search parameters in order to identify highly related bacterial homologs for each searched gene.

[0219] The following Table 2 provides the NCBI Reference Sequence Name of the polypeptide sequences of genes identified during this search. Additional homologs and orthologs are identifiable by additional sequence searches based on the Cpf1 sequences of the present disclosure, including those of SEQ ID Nos: 7, 8, 9, 10, 11, 12, 13, 14, 15, 16, 17, 18, 19, 20, 21, 22, 37, 38, 39, 40, 41, 42, 43, 44, 45, 46, 47, 48, 49, 50, 51, 52, 53, 54, 55, 56, 57, 58, 59, 60, 61, 62, 63, 64, 65, 66, 67, 68, 69, 70, 71, 72, 73, 74, 75, 76, 77, and 78.

TABLE 2
Selected Cpf1 Gene Homologs Identified Through BLASTP ® Homology Search
Engine

| | | | |
|---|---|---|---|
| AJI156734 | KGF47514 | WP_016301126 | WP_039658684 |
| AKG06878 | KKP36646 | WP_018359861 | WP_044110123 |
| AKG08867 | KKQ36153 | WP_020988726 | WP_044910712 |
| AKG14689 | KKQ38174 | WP_021736722 | WP_044910713 |
| AKG18099 | KKR91555 | WP_023936172 | WP_044919442 |
| CDA41776 | KKT48220 | WP_023941260 | WP_045971446 |
| CDF09621 | KKT50231 | WP_024988992 | WP_046328599 |
| CDF12615 | KUJ74576 | WP_027109509 | WP_048112740 |
| CUM80100 | KXB38146 | WP_027216152 | WP_049895985 |
| CUO47728 | WP_003034647 | WP_027407524 | WP_050786240 |
| CUO57667 | WP_003040289 | WP_028248456 | WP_051666128 |
| CUO70892 | WP_004339290 | WP_028830240 | WP_052585281 |
| CUP14506 | WP_005398606 | WP_029392401 | WP_052943011 |
| CUQ77205 | WP_006283774 | WP_031492824 | WP_059369505 |
| CUQ81832 | WP_009217842 | WP_035798880 | WP_062376669 |
| EFL46285 | WP_012739647 | WP_036388671 | |
| EKE06926 | WP_013282991 | WP_036851563 | |
| EKE28449 | WP_014085038 | WP_036887416 | |
| WP_062499108 | WP_014550095 | WP_036890108 | |
| KFO67989 | WP_015504779 | WP_037975888 | |

### Example 8: In Vitro Cpf1 Assembly

[0220] This example was designed to demonstrate the flexibility of CRISPR cloning. As an initial step, several resistance plasmids encoding for Kanamycin or Chloramphenicol resistance genes were created from source vectors pzHR039 (SEQ ID No: 89) and 13000223370 (SEQ ID No:90), respectively. The Kanamycin resistance plasmids were each designed so as to include various Cpf1 landing sites flanking the GFP gene (when digested, these plasmids produce “the kanamycin resistant plasmid backbone”). The Chloramphenicol resistance plasmids were each designed so as to include various Cpf1 landing sites flanking the Chloramphenicol resistance gene (when digested, these plasmids produce “the chloramphenicol resistant insert”). Sequences, and vector maps for each plasmid used in this Example are disclosed in Table 3.

[0221] Each Kanamycin and Chloramphenicol resistant plasmid was initially linearized with type-II restriction enzymes KpnI-HF and PvuI-HF, respectively (both commercially available from NEB). The location of the KpnI and PvuI restriction sites on each plasmid are noted in the vector maps provided in FIGS. 15-22. After linearization, the resistance plasmids were no longer capable of self-replication in a bacterial host system.

[0222] Linearized resistance plasmids were then mixed with a pre-incubated mixture of 15 ug (1.58 uM final concentration) of Cpf1 enzyme and 2 uL of 5 uM of each guide RNA described below (0.167 uM final concentration) in a 60 uL reaction to form active CRISPR complexes.

[0223] The Cpf1 enzyme used in this Example was commercially obtained from IDT. The Cpf1 was sourced from Acidaminococcus sp. Cpf1 (AsCpf1). The enzyme was further modified to comprise 1 N-terminal nuclear localization sequence (NLS) and 1 C-terminal NLSs, as well as 3 N-terminal FLAG tags and a C-terminal 6-His tag.

[0224] The guide RNAs used in this example were custom ordered from IDT. Each guide RNA was designed to target a different CRISPR landing site located within the linearized resistance plasmid. In this Example, the Cpf1 landing sites of the backbone plasmid were arranged in an inward orientation, such that the landing sites would remain on the vector after digestion. Table 3 provides the guide sequence portion of each guide RNA used in their DNA format (see guide sequences A-D on Table 3). The CRISPR complexes in the mixture were thus designed to cleave out the GFP gene from each kanamycin resistant plasmid to generate kanamycin resistant plasmid backbones (see FIG. 13, second panel). The CRISPR complexes in the mixture were also designed to cleave out the chloramphenicol resistance gene from the chloramphenicol resistance plasmid to generate chloramphenicol resistant inserts (see FIG. 13, second panel). The kanamycin resistant plasmid backbone and the chloramphenicol resistant insert of each reaction were similarly designed to generate compatible sticky 5′ and 3′ ends that would result in hybridization of the ends to produce a “dual resistant” kanamycin and chloramphenicol plasmid.

[0225] The linearized resistance plasmid mixtures comprising the Cpf1 and guide RNAs were allowed to incubate for 3 hours at 37 Celsius in the manufacturer's recommended Cpf1 buffer. Selected reactions were run on agarose gels and the resulting fragments were purified using standard DNA extraction kits (Zymo Research kit, used according to manufacturer's instructions). Purified (control) and unpurified (test)

[0226] DNA fragments comprising the kanamycin resistant plasmid backbone and the chloramphenicol resistant insert, each comprising two compatible Cpf1 sticky ends were combined in a new reactions with or without a T4 DNA ligase (commercially available form NEB) and transformed into NEB10-B cells (commercially available from NEB). Transformed cells were plated on media augmented with both Kanamycin and Chloramphenicol designed to prevent the growth of any cells that did not contain functional resistance plasmids.

[0227] Individual colonies were sent for sequencing to confirm junctions of Cpf1 cloning. Recovered colonies were also validated via PCR using primers described in Table 3. FIG. 13 illustrates the general experimental design described above, except that the plasmids were linearized prior to Cpf1 digestion, as described above.

TABLE 3
List of sequences used in this Example

| Component | Description | SEQ ID NO |
|---|---|---|
| GFP Cpf1 A fwd | 5′ CAGCACCTGGATTACCCTGTTATCCCTAGTTTTGGGTTAAAGA | SEQ ID No: 99 |
| | TGGTTAAATGATTCGAAAATAATAAAGGGAAAATCA 3′ | |
| GFP Cpf1 B fwd | 5′ CAGCACCTGGATTACCCTGTTATCCCTAGTTTTGGGATGTTAA | SEQ ID No: 100 |
| | GAGTCCCTATCTTCGAAAATAATAAAGGGAAAATCA 3′ | |
| GFP Cpf1 D fwd | 5′ CAGCACCTGGATTACCCTGTTATCCCTAGTTTTGAGGAGTGTT | SEQ ID No: 101 |
| | CAGTCTCCGTGAACTCGAAAATAATAAAGGGAAAATCA 3′ | |
| GFP Cpf1 C rvs | 5′ CGCTTCCTCCTGAAAATGCAGCTAGGTAGTTTTGACCGCCCCC | SEQ ID No: 102 |
| | CCCATACCCCAATCGACATGCCGAACTCAGAAGTGA 3′ | |
| GFP Cpf1 B rvs | 5′ CGCTTCCTCCTGAAAATGCAGCTAGGTAGTTTTGGGATGTTAA | SEQ ID No: 103 |
| | GAGTCCCTATCTTCGACATGCCGAACTCAGAAGTGA 3′ | |
| CAT01 Cpf1 A fwd | 5′ TTTGGGTTAAAGATGGTTAAATGATTCGACATACACATAA | SEQ ID No: 104 |
| | AGTAGCTTGCG 3′ | |
| CAT01 Cpf1 B fwd | 5′ TTTGGGATGTTAAGAGTCCCTATCTTCGACATACACATAAA | SEQ ID No: 105 |
| | GTAGCTTGCG 3′ | |
| CAT01 Cpf1 D fwd | 5′ TTTGAGGAGTGTTCAGTCTCCGTGAACTCGACATACACATA | SEQ ID No: 106 |
| | AAGTAGCTTGCG 3′ | |
| CAT01 Cpf1 B rvs | 5′ TTTGGGATGTTAAGAGTCCCTATCTTCGACTGGAAGGACA | SEQ ID No: 107 |
| | AGGGGGACC 3′ | |
| CAT01 Cpf1 C rvs | 5′ TTTGACCGCCCCCCCCATACCCCAATCGACTGGAAGGACA | SEQ ID No: 108 |
| | AGGGGGACC 3′ | |
| Cpf1 guide | 5′ GGTTAAAGATGGTTAAATGAT 3′ | SEQ ID No: 109 |
| sequence A | | |
| Cpf1 guide | 5′ GGATGTTAAGAGTCCCTATCT 3′ | SEQ ID No: 110 |
| sequence B | | |
| Cpf1 guide | 5′ ACCGCCCCCCCCATACCCCAA 3′ | SEQ ID No: 111 |
| sequence C | | |
| Cpf1 guide | 5′ AGGAGTGTTCAGTCTCCGTGAAC 3′ | SEQ ID No: 112 |
| sequence D | | |
| pzHR039 | Source for Kanamycin resistance and GFP. See listing for full | SEQ ID NO: 89 |
| | sequence | |
| 13000223370 | Source for Chloramphenicol resistance and GFP. See listing | SEQ ID NO: 90 |
| | for full sequence | |
| pJDI427 | GFP Cpf1 AB #1a pMB1 KanR CENARS TRP1 see listing for full | SEQ ID NO: 91 |
| | sequence | FIG 15 |
| pJDI429 | GFP Cpf1 BC 3a pMB1 KanR CENARS TRP1 see listing for full | SEQ ID NO: 92 |
| | sequence | FIG 16 |
| pJDI430 | GFP Cpf1 DB 4a pMB1 KanR CENARS TRP1 see listing for full | SEQ ID NO: 93 |
| | sequence | FIG 17 |
| pJDI431 | GFP Cpf1 DC 5a pMB1 KanR CENARS TRP1 see listing for full | SEQ ID NO: 94 |
| | sequence | FIG 18 |
| pJDI432 | pJET AmpR CmR blunt Cpf1 AB 1c see listing for full sequence | SEQ ID NO: 95 |
| | | FIG 19 |
| pJDI434 | pJET AmpR CmR blunt Cpf1 BC 3a see listing for full sequence | SEQ ID NO: 96 |
| | | FIG 20 |
| pJDI435 | pJET AmpR CmR blunt Cpf1 DB 4a see listing for full sequence | SEQ ID NO: 97 |
| | | FIG 21 |
| pJDI436 | pJET AmpR CmR blunt Cpf1 DC 5d see listing for full sequence | SEQ ID NO: 98 |
| | | FIG 22 |

[0228] The results of this experiment are shown in Table 4 and FIG. 14. Reaction numbers for each transformation are shown along the top row, with guide RNAs used listed along the left-hand column of Table 4. The comparison of identical Cpf1 reactions with and without ligase showed a 9.9-fold increase in transformants in the presence of ligase enzyme, indicating that colony growth was due to formation of the double kanamycin and chloramphenicol resistant plasmid after Cpf1 digestion. The no-ligase reactions are matched controls designed to establish that the reactions are specific, and were not simply due to the presence of contaminating levels of undigested resistance plasmids.

[0229] Sixteen individual colonies were Sanger sequenced to verify both the upstream and downstream cloning junctions. In seven of seven upstream sequenced junctions, and eight of nine downstream junctions, the Cpf1 mediated clones from the reactions with T4 DNA ligase indicated faithful digestion and ligation.

[0230] Reactions 71 and 72 were transformed with Cpf1 digested plasmids that were not subjected to DNA gel purification steps. Cpf1 enzyme however was heat inactivated according to supplier's instructions before addition of T4 DNA ligase (reaction 72). Reactions 71 and 72 exhibited the same ligase-dependency.

TABLE 4
Resistant Transformant Colonies Comprising Cpf1-edited vectors

| | 55 | 56 | 59 | 60 | 67 | 68 | 71* | 72* |
|---|---|---|---|---|---|---|---|---|
| Guides A + B | yes | yes | | | | | | |
| Guides B + C | | | yes | yes | | | | |
| Guides D + C | | | | | yes | yes | yes | yes |
| T4 Ligase | No | Yes | No | Yes | No | Yes | No | Yes |
| # of transformants | 1 | 20 | 0 | 141 | 0 | 12 | 2 | 95 |
| (Kan Resistant | | | | | | | | |
| Colonies) | | | | | | | | |

*Plates 71 and 72 were transformed with digested DNA that had not undergone DNA gel purification after Cpf1 digestion.

### Further Embodiments of the Invention

[0231] Other subject matter contemplated by the present disclosure is set out in the following numbered embodiments:

1. A method for assembling gene constructs in vitro from a plurality of DNA fragments, said method comprising the steps of:
[0232] (a) providing a plurality of DNA fragments comprising a first and second DNA fragment, wherein said first DNA fragment comprises a sequence overlap of at least three nucleic acids anywhere within the second DNA fragment;
[0233] (b) digesting the first DNA fragment with a Cpf1 CRISPR complex, thereby creating a sticky DNA end at the 5′ and/or 3′ of said first DNA fragment, wherein said digested first DNA fragment ceases to be a target for said Cpf1 CRISPR complex;
[0234] (c) annealing the sticky end of the digested first DNA fragment from step (b) to a second compatible sticky end on the second DNA fragment; and
[0235] (d) ligating the annealed DNA fragments from step (c) together, resulting in a ligated product;
   wherein the resulting ligated product is an assembled construct.
   2. The method of embodiment 1, wherein no genetic scars are introduced into the assembled construct from practicing the method.
   3. The method of embodiment 1 or 2, wherein the Cpf1 CRISPR complex comprises i) a Cpf1 endonuclease, and ii) a crRNA capable of directing sequence-specific binding of the Cpf1 endonuclease to the first DNA fragment.
   4. The method of embodiment 3, wherein the Cpf1 endonuclease is non-naturally occurring.
   4.1 The method of embodiment 4, wherein the Cpf1 endonuclease is translationally fused to a ligase via a linker sequence.
   4.2 The method of embodiment 4 or 4.1, wherein the Cpf1 endonuclease comprises a nuclear localization signal (NLS).
   5. The method of any one of embodiments 3 or 4.2, wherein the crRNA is non-naturally occurring.
   6. The method of any one of embodiments 1-5, wherein the Cpf1 CRISPR complex of step (b) is targeted to a portion of the first DNA fragment that will be cleaved away from the first DNA fragment, such that the Cpf1 CRISPR complex no longer targets the digested first DNA fragment.
   7. The method of embodiment 6, wherein the Cpf1 CRISPR complex is targeted to a portion of the first DNA fragment that will result in the creation of a sticky end corresponding to the sequence overlap between the first DNA fragment and the second DNA fragment.
   8. The method of any one of embodiments 1-7, wherein steps (b), and (d) are conducted in the same reaction without needing to inactivate the Cpf1 CRISPR complex.
   9. The method of any one of embodiments 1-8, wherein the provided second DNA fragment comprises a preexisting sticky end compatible with the sticky end of the digested first DNA fragment.
   10. The method of any one of embodiments 1-9, wherein step (b) further comprises digesting the second DNA fragment with a second Cpf1 CRISPR complex, thereby creating a second sticky DNA end at the 5′ and/or 3′ of said second DNA fragment, wherein said digested second DNA fragment ceases to be a target for said second Cpf1 CRISPR endonuclease system.
   11. The method of embodiment 10, wherein the first Cpf1 CRISPR complex and the second Cpf1 CRISPR complex are identical (e.g., use the same crRNA).
   12. A method for editing the genome of a cell in vivo, said method comprising the steps of:
[0236] a) introducing into the cell one or more vectors encoding for at least two Cpf1 CRISPR complexes, said one or more vectors comprising:
   [0237] i) a first polynucleotide encoding for a first crRNA that hybridizes to a first selected target sequence within the genome of the cell;
   [0238] ii) a second polynucleotide encoding a second crRNA that hybridizes to a second selected target sequence within the genome of the cell; and
   [0239] iii) a third polynucleotide encoding a Cpf1 endonuclease;
[0240] wherein components (i), (ii), and (iii) are expressed in the cell, and the Cpf1 endonuclease cleaves the cell's genome at the first and second selected target sequences, thereby producing sticky ends on the cleaved ends of the cell's genome;
[0241] wherein the first and second target sequences are positioned in an outwardly facing inverse orientation of a portion of the cell's genome slated for removal, such that removal of said portion of the cell's genome will also remove the first and second target sites from the genome;
[0242] (b) annealing the resulting genome sticky ends to each other; and
[0243] (c) ligating the annealed genome sticky ends from step (b).
   13. The method of embodiment 12, wherein the one or more vectors of step (a) further comprise a fourth, insert polynucleotide, wherein said insert polynucleotide is also cleaved by the Cpf1 endonuclease, thereby creating sticky ends on the insert polynucleotide that are compatible with the sticky ends of the cell's genome;
   wherein the annealing step (b) is modified to anneal the sticky ends of the genome to the sticky ends of the insert polynucleotide; and
   wherein the ligating step (c) is modified to ligate the annealed genome and insert sticky ends.
   14. The method of embodiment 12 or 13, wherein no genetic scars are introduced into the genome from practicing the method.
   15. The method of embodiment 13, wherein the fourth, insert polynucleotide, also comprises two copies of the first target sequence positioned in an inwardly facing inverse orientation, such that cleavage of said insert polynucleotide by the Cpf1 endonuclease removes the first and second copies of the first target site from the insert polynucleotide.
   16. The method of any one of embodiments 12-15, wherein the one or more vectors comprise a fifth polynucleotide, said fifth polynucleotide encoding a DNA ligase.
   17. The method of embodiment 16, wherein the DNA ligase is selected from the group consisting of T4 ligase, and a T7 ligase.
   18. The method of any one of embodiments 12-17, wherein the Cpf1 endonuclease is non-naturally occurring.
   18.1 The method of embodiment 18, wherein the Cpf1 endonuclease is translationally fused to a ligase via a linker sequence.
   18.2 The method of embodiment 18 or 18.1, wherein the Cpf1 endonuclease comprises a nuclear localization signal (NLS).
   19. The method of any one of embodiments 12-18.2, wherein the first or second crRNA is non-naturally occurring.
   20. The method of any one of embodiments 16, and 18-19, wherein the DNA ligase is non-naturally occurring.
   21. The method of any one of embodiments 12-20, wherein the combination of (i), (ii), and (iii) is non-naturally occurring.
   22. A method for removing a transposon from the genome of a cell in vivo, said method comprising the steps of:
[0244] a) introducing into the cell a CRISPR complex encoded in one or more vectors comprising:
   [0245] i) a first polynucleotide encoding a first crRNA that hybridizes to a first selected target sequence within the transposon;
   [0246] ii) a second polynucleotide encoding a second crRNA that hybridizes to a second selected target sequence within the transposon; and
   [0247] iii) a third polynucleotide encoding a CRISPR endonuclease;
[0248] wherein components (i), (ii), and (iii) are expressed in the cell, and the CRISPR endonuclease cleaves the cell's genome at the first and second selected target sequences, thereby producing sticky ends on the cleaved ends of the cell's genome;
[0249] wherein the first and second target sequences are positioned in an outwardly facing inverse orientation of within the transposon, such that removal of said transposon will also remove the first and second target sites from that portion of the genome;
[0250] (b) annealing the resulting genome sticky ends to each other; and
[0251] (c) ligating the annealed genome sticky ends from step (b), resulting in a ligated genome; wherein the resulting ligated genome lacks said transposon.
   23. The method of embodiment 22, wherein no genetic scars are introduced into the genome from practicing the method.
   24. The method of embodiment 22 or 23, wherein the one or more vectors further comprise a fifth polynucleotide, said fifth polynucleotide encoding a DNA ligase.
   25. The method of embodiment 24, wherein the DNA ligase is selected from the group consisting of T4 ligase, and a T7 ligase.
   26. The method of any one of embodiments 22-25, wherein the CRISPR endonuclease is non-naturally occurring.
   26.1 The method of embodiment 26, wherein the CRISPR endonuclease is translationally fused to a ligase via a linker sequence.
   26.2 The method of embodiment 26 or 26.1, wherein the CRISPR endonuclease comprises a nuclear localization signal (NLS).
   27. The method of any one of embodiments 22-26.2, wherein the first or second crRNA is non-naturally occurring.
   28. The method of any one of embodiments 24, and 26-27, wherein the DNA ligase is non-naturally occurring.
   29. The method of any one of embodiments 22-28, wherein the combination of (i), (ii), and (iii) is non-naturally occurring.
   30. The method of any one of embodiments 22-29, wherein the CRISPR endonuclease is Cpf1.
   31. A method for assembling gene constructs in vitro from a plurality of DNA fragments, said method comprising the steps of:
[0252] (a) providing a plurality of DNA fragments comprising a first and second DNA fragment, wherein said first DNA fragment comprises a sequence overlap of at least three nucleic acids anywhere within the second DNA fragment;
[0253] (b) digesting the first DNA fragment with a Targetable Enzyme, thereby creating a sticky DNA end at the 5′ and/or 3′ of said first DNA fragment, wherein said digested first DNA fragment ceases to be a target for said Targetable Enzyme;
[0254] (c) annealing the sticky end of the digested first DNA fragment from step (b) to a second compatible sticky end on the second DNA fragment; and
[0255] (d) ligating the annealed DNA fragments from step (c) together, resulting in a ligated product;
   wherein the resulting ligated product is an assembled construct.
   32. The method of embodiment 31, wherein no genetic scars are introduced into the assembled construct from practicing the method.
   33. The method of embodiment 31 or 32, wherein the Targetable Enzyme comprises a Cas9 endonuclease translationally fused to a DNA nuclease capable of producing 5′ or 3′ overhangs.
   34 The method of embodiment 33, wherein the Cas9 is translationally fused to the DNA nuclease via a linker sequence.
   35 The method of embodiment 33 or 34, wherein the Cas9 comprises a nuclear localization signal (NLS).

### INCORPORATION BY REFERENCE

[0256] All references, articles, publications, patents, patent publications, and patent applications cited herein are incorporated by reference in their entireties for all purposes. However, mention of any reference, article, publication, patent, patent publication, and patent application cited herein is not, and should not, be taken as an acknowledgment or any form of suggestion that they constitute valid prior art or form part of the common general knowledge in any country in the world.

1. A method for assembling gene constructs in vitro from a plurality of DNA fragments, said method comprising the steps of:
(a) providing a plurality of DNA fragments comprising a first and second DNA fragment, wherein said first DNA fragment comprises a sequence overlap of at least three nucleic acids anywhere within the second DNA fragment;
(b) digesting the first DNA fragment with a Cpf1 CRISPR system, thereby creating a sticky DNA end at the 5′ and/or 3′ of said first DNA fragment, wherein said digested first DNA fragment ceases to be a target for said Cpf1 CRISPR system;
(c) annealing the sticky end of the digested first DNA fragment from step (b) to a second compatible sticky end on the second DNA fragment; and
(d) ligating the annealed DNA fragments from step (c) together, resulting in a ligated product;
wherein the resulting ligated product is an assembled construct;
wherein steps (b) and (d) are conducted in the same reaction without needing to inactivate the Cpf1 CRISPR system.

2. The method of claim 1, wherein no genetic scars are introduced into the assembled construct from practicing the method.

3. The method of claim 1, wherein the Cpf1 CRISPR system comprises i) a Cpf1 endonuclease, and ii) a crRNA capable of directing sequence-specific binding of the Cpf1 endonuclease to the first DNA fragment.

4. The method of claim 3, wherein the Cpf1 endonuclease is non-naturally occurring.

5. The method of claim 3, wherein the crRNA is non-naturally occurring.

6. The method of claim 1, wherein the Cpf1 CRISPR system of step (b) is targeted to a portion of the first DNA fragment that will be cleaved away from the first DNA fragment, such that the Cpf1 CRISPR system no longer targets the digested first DNA fragment.

7.-8. (canceled)

9. The method of claim 1, wherein the provided second DNA fragment comprises a preexisting sticky end compatible with the sticky end of the digested first DNA fragment.

10. The method of claim 1, wherein step (b) further comprises digesting the second DNA fragment with a second Cpf1 CRISPR system, thereby creating the second compatible sticky end on the second DNA fragment, wherein said digested second DNA fragment ceases to be a target for said second Cpf1 CRISPR endonuclease system.

11. The method of claim 10, wherein the first Cpf1 CRISPR system and the second Cpf1 CRISPR system are identical.

12. A method for editing the genome of a cell in vivo, said method comprising the steps of:
a) introducing into the cell a Cpf1 CRISPR system comprising one or more vectors comprising:
i) a first polynucleotide encoding a first crRNA that hybridizes to a first selected target sequence within the genome of the cell;
ii) a second polynucleotide encoding a second crRNA that hybridizes to a second selected target sequence within the genome of the cell; and
iii) a third polynucleotide encoding a Cpf1 endonuclease;
wherein components (i), (ii), and (iii) are expressed in the cell, and the Cpf1 endonuclease cleaves the cell's genome at the first and second selected target sequences, thereby producing sticky ends on the cleaved ends of the cell's genome;
wherein the first and second target sequences are positioned in an outwardly facing inverse orientation of a portion of the cell's genome slated for removal, such that removal of said portion of the cell's genome will also remove the first and second target sites from the genome;
(b) annealing the resulting genome sticky ends to each other; and
(c) ligating the annealed genome sticky ends from step (b).

13. The method of claim 12, wherein the one or more vectors of step (a) further comprise a fourth, insert polynucleotide, wherein said insert polynucleotide is also cleaved by the Cpf1 endonuclease, thereby creating sticky ends on the insert polynucleotide that are compatible with the sticky ends of the cell's genome;
wherein the annealing step (b) is modified to anneal the sticky ends of the genome to the sticky ends of the insert polynucleotide; and
wherein the ligating step (c) is modified to ligate the annealed genome and insert sticky ends.

14. The method of claim 12, wherein no genetic scars are introduced into the genome from practicing the method.

15. The method of claim 13, wherein the fourth, insert polynucleotide, also comprises two copies of the first target sequence positioned in an inwardly facing inverse orientation, such that cleavage of said insert polynucleotide by the Cpf1 endonuclease removes the first and second copies of the first target site from the insert polynucleotide.

16. The method of claim 12, wherein the one or more vectors comprise a polynucleotide encoding a DNA ligase.

17. The method of claim 16, wherein the DNA ligase is selected from the group consisting of T4 ligase, and a T7 ligase.

18. The method of claim 12, wherein the Cpf1 endonuclease is non-naturally occurring.

19. The method of claim 12, wherein the first or second crRNA is non-naturally occurring.

20. The method of claim 16, wherein the DNA ligase is non-naturally occurring.

21. The method of claim 12, wherein the combination of (i), (ii), and (iii) is non-naturally occurring.

22.-30. (canceled)

31. The method of claim 13, wherein no genetic scars are introduced into the genome from practicing the method.

The application's sequence listing, which the Patent Office published only in electronic form, follows.

SEQUENCE LISTING (112 sequences)

SEQ ID NO: 1 - protein, 984 aa, Campylobacter jejuni
  MISC_FEATURE (1)..(984): Cas9
MARILAFDIGISSIGWAFSENDELKDCGVRIFTKVENPKTGESLALPRRLARSARKRLARRKARLNHLKHLIANEFKLNYEDYQSFDESLAKAYKGSLISPYELRFRALNELLSKQDFARVILHIAKRRGYDDIKNSDDKEKGAILKAIKQNEEKLANYQSVGEYLYKEYFQKFKENSKEFTNVRNKKESYERCIAQSFLKDELKLIFKKQREFGFSFSKKFEEEVLSVAFYKRALKDFSHLVGNCSFFTDEKRAPKNSPLAFMFVALTRIINLLNNLKNTEGILYTKDDLNALLNEVLKNGTLTYKQTKKLLGLSDDYEFKGEKGTYFIEFKKYKEFIKALGEHNLSQDDLNEIAKDITLIKDEIKLKKALAKYDLNQNQIDSLSKLEFKDHLNISFKALKLVTPLMLEGKKYDEACNELNLKVAINEDKKDFLPAFNETYYKDEVTNPVVLRAIKEYRKVLNALLKKYGKVHKINIELAREVGKNHSQRAKIEKEQNENYKAKKDAELECEKLGLKINSKNILKLRLFKEQKEFCAYSGEKIKISDLQDEKMLEIDHIYPYSRSFDDSYMNKVLVFTKQNQEKLNQTPFEAFGNDSAKWQKIEVLAKNLPTKKQKRILDKNYKDKEQKNFKDRNLNDTRYIARLVLNYTKDYLDFLPLSDDENTKLNDTQKGSKVHVEAKSGMLTSALRHTWGFSAKDRNNHLHHAIDAVIIAYANNSIVKAFSDFKKEQESNSAELYAKKISELDYKNKRKFFEPFSGFRQKVLDKIDEIFVSKPERKKPSGALHEETFRKEEEFYQSYGGKEGVLKALELGKIRKVNGKIVKNGDMFRVDIFKHKKTNKFYAVPIYTMDFALKVLPNKAVARSKKGEIKDWILMDENYEFCFSLYKDSLILIQTKDMQEPEFVYYNAFTSSTVSLIVSKHDNKFETLSKNQKILFKNANEKEVIAKSIGIQNLKVFEKYIVSALGEVTKAEFRQREDFKK

SEQ ID NO: 2 - protein, 1056 aa, Pasteurella multocida
  MISC_FEATURE (1)..(1056): Cas9
MQTTNLSYILGLDLGIASVGWAVVEINENEDPIGLIDVGVRIFERAEVPKTGESLALSRRLARSTRRLIRRRAHRLLLAKRFLKREGILSTIDLEKGLPNQAWELRVAGLERRLSAIEWGAVLLHLIKHRGYLSKRKNESQTNNKELGALLSGVAQNHQLLQSDDYRTPAELALKKFAKEEGHIRNQRGAYTHTFNRLDLLAELNLLFAQQHQFGNPHCKEHIQQYMTELLMWQKPALSGEAILKMLGKCTHEKNEFKAAKHTYSAERFVWLTKLNNLRILEDGAERALNEEERQLLINHPYEKSKLTYAQVRKLLGLSEQAIFKHLRYSKENAESATFMELKAWHAIRKALENQGLKDTWQDLAKKPDLLDEIGTAFSLYKTDEDIQQYLTNKVPNSVINALLVSLNFDKFIELSLKSLRKILPLMEQGKRYDQACREIYGHHYGEANQKTSQLLPAIPAQEIRNPVVLRTLSQARKVINAIIRQYGSPARVHIETGRELGKSFKERREIQKQQEDNRTKRESAVQKFKELFSDFSSEPKSKDILKFRLYEQQHGKCLYSGKEINIHRLNEKGYVEIDHALPFSRTWDDSFNNKVLVLASENQNKGNQTPYEWLQGKINSERWKNFVALVLGSQCSAAKKQRLLTQVIDDNKFIDRNLNDTRYIARFLSNYIQENLLLVGKNKKNVFTPNGQITALLRSRWGLIKARENNNRHHALDAIVVACATPSMQQKITRFIRFKEVHPYKIENRYEMVDQESGEIISPHFPEPWAYFRQEVNIRVFDNHPDTVLKEMLPDRPQANHQFVQPLFVSRAPTRKMSGQGHMETIKSAKRLAEGISVLRIPLTQLKPNLLENMVNKEREPALYAGLKARLAEFNQDPAKAFATPFYKQGGQQVKAIRVEQVQKSGVLVRENNGVADNASIVRTDVFIKNNKFFLVPIYTWQVAKGILPNKAIVAHKNEDEWEEMDEGAKFKFSLFPNDLVELKTKKEYFFGYYIGLDRATGNISLKEHDGEISKGKDGVYRVGVKLALSFEKYQVDELGKNRQICRPQQRQPVR

SEQ ID NO: 3 - protein, 1368 aa, Streptococcus pyogenes [sequence omitted]

SEQ ID NO: 4 - protein, 1121 aa, Streptococcus thermophilus
  MISC_FEATURE (1)..(1121): Cas9
MSDLVLGLDIGIGSVGVGILNKVTGEIIHKNSRIFPAAQAENNLVRRTNRQGRRLARRKKHRRVRLNRLFEESGLITDFTKISINLNPYQLRVKGLTDELSNEELFIALKNMVKHRGISYLDDASDDGNSSVGDYAQIVKENSKQLETKTPGQIQLERYQTYGQLRGDFTVEKDGKKHRLINVFPTSAYRSEALRILQTQQEFNPQITDEFINRYLEILTGKRKYYHGPGNEKSRTDYGRYRTSGETLDNIFGILIGKCTFYPDEFRAAKASYTAQEFNLLNDLNNLTVPTETKKLSKEQKNQIINYVKNEKAMGPAKLFKYIAKLLSCDVADIKGYRIDKSGKAEIHTFEAYRKMKTLETLDIEQMDRETLDKLAYVLTLNTEREGIQEALEHEFADGSFSQKQVDELVQFRKANSSIFGKGWHNFSVKLMMELIPELYETSEEQMTILTRLGKQKTTSSSNKTKYIDEKLLTEEIYNPVVAKSVRQAIKIVNAAIKEYGDFDNIVIEMARETNEDDEKKAIQKIQKANKDEKDAAMLKAANQYNGKAELPHSVFHGHKQLATKIRLWHQQGERCLYTGKTISIHDLINNSNQFEVDHILPLSITFDDSLANKVLVYATANQEKGQRTPYQALDSMDDAWSFRELKAFVRESKTLSNKKKEYLLTEEDISKFDVRKKFIERNLVDTRYASRVVLNALQEHFRAHKIDTKVSVVRGQFTSQLRRHWGIEKTRDTYHHHAVDALIIAASSQLNLWKKQKNTLVSYSEDQLLDIETGELISDDEYKESVFKAPYQHFVDTLKSKEFEDSILFSYQVDSKFNRKISDATIYATRQAKVGKDKADETYVLGKIKDIYTQDGYDAFMKIYKKDKSKFLMYRHDPQTFEKVIEPILENYPNKQINEKGKEVPCNPFLKYKEEHGYIRKYSKKGNGPEIKSLKYYDSKLGNHIDITPKDSNNKVVLQSVSPWRADVYFNKTTGKYEILGLKYADLQFEKGTGTYKISQEKYNDIKKKEGVDSDSEFKFTLYKNDLLLVKDTETKEQQLFRFLSRTMPKQKHYVELKPYDKQKFEGGEALIKVLGNVANSGQCKKGLGKSNISIYKVRTDVLGNQHIIKNEGDKPKLDF

SEQ ID NO: 5 - protein, 1082 aa, Neisseria meningitides
  MISC_FEATURE (1)..(1082): Cas9
MAAFKPNPINYILGLDIGIASVGWAMVEIDEDENPICLIDLGVRVFERAEVPKTGDSLAMARRLARSVRRLTRRRAHRLLRARRLLKREGVLQAADFDENGLIKSLPNTPWQLRAAALDRKLTPLEWSAVLLHLIKHRGYLSQRKNEGETADKELGALLKGVADNAHALQTGDFRTPAELALNKFEKESGHIRNQRGDYSHTFSRKDLQAELILLFEKQKEFGNPHVSGGLKEGIETLLMTQRPALSGDAVQKMLGHCTFEPAEPKAAKNTYTAERFIWLTKLNNLRILEQGSERPLTDTERATLMDEPYRKSKLTYAQARKLLGLEDTAFFKGLRYGKDNAEASTLMEMKAYHAISRALEKEGLKDKKSPLNLSPELQDEIGTAFSLFKTDEDITGRLKDRIQPEILEALLKHISFDKFVQISLKALRRIVPLMEQGKRYDEACAEIYGDHYGKKNTEEKIYLPPIPADEIRNPVVLRALSQARKVINGVVRRYGSPARIHIETAREVGKSFKDRKEIEKRQEENRKDREKAAAKFREYFPNFVGEPKSKDILKLRLYEQQHGKCLYSGKEINLGRLNEKGYVEIDHALPFSRTWDDSFNNKVLVLGSENQNKGNQTPYEYFNGKDNSREWQEFKARVETSRFPRSKKQRILLQKFDEDGFKERNLNDTRYVNRFLCQFVADRMRLTGKGKKRVFASNGQITNLLRGFWGLRKVRAENDRHHALDAVVVACSTVAMQQKITRFVRYKEMNAFDGKTIDKETGEVLHQKTHFPQPWEFFAQEVMIRVFGKPDGKPEFEEADTPEKLRTLLAEKLSSRPEAVHEYVTPLFVSRAPNRKMSGQGHMETVKSAKRLDEGVSVLRVPLTQLKLKDLEKMVNREREPKLYEALKARLEAHKDDPAKAFAEPFYKYDKAGNRTQQVKAVRVEQVQKTGVWVRNHNGIADNATMVRVDVFEKGDKYYLVPIYSWQVAKGILPDRAVVQGKDEEDWQLIDDSFNFKFSLHPNDLVEVITKKARMFGYFASCHRGTGNINIRIHDLDHKIGKNGILEGIGVKTALSFQKYQIDELGKEIRPCRLKKRPPVR

SEQ ID NO: 6 - protein, 1345 aa, Streptococcus mutans
  MISC_FEATURE (1)..(1345): Cas9
MKKPYSIGLDIGTNSVGWAVVTDDYKVPAKKMKVLGNTDKSHIEKNLLGALLFDSGNTAEDRRLKRTARRRYTRRRNRILYLQEIFSEEMGKVDDSFFHRLEDSFLVTEDKRGERHPIFGNLEEEVKYHENFPTIYHLRQYLADNPEKVDLRLVYLALAHIIKFRGHFLIEGKFDTRNNDVQRLFQEFLAVYDNTFENSSLQEQNVQVEEILTDKISKSAKKDRVLKLFPNEKSNGRFAEFLKLIVGNQADFKKHFELEEKAPLQFSKDTYEEELEVLLAQIGDNYAELFLSAKKLYDSILLSGILTVTDVGTKAPLSASMIQRYNEHQMDLAQLKQFIRQKLSDKYNEVFSDVSKDGYAGYIDGKTNQEAFYKYLKGLLNKIEGSGYFLDKIEREDFLRKQRTFDNGSIPHQIHLQEMRAIIRRQAEFYPFLADNQDRIEKLLTFRIPYYVGPLARGKSDFAWLSRKSADKITPWNFDEIVDKESSAEAFINRMTNYDLYLPNQKVLPKHSLLYEKFTVYNELTKVKYKTEQGKTAFFDANMKQEIFDGVFKVYRKVTKDKLMDFLEKEFDEFRIVDLTGLDKENKVFNASYGTYHDLCKILDKDFLDNSKNEKILEDIVLTLTLFEDREMIRKRLENYSDLLTKEQVKKLERRHYTGWGRLSAELIHGIRNKESRKTILDYLIDDGNSNRNFMQLINDDALSFKEEIAKAQVIGETDNLNQVVSDIAGSPAIKKGILQSLKIVDELVKIMGHQPENIVVEMARENQFTNQGRRNSQQRLKGLTDSIKEFGSQILKEHPVENSQLQNDRLFLYYLQNGRDMYTGEELDIDYLSQYDIDHIIPQAFIKDNSIDNRVLTSSKENRGKSDDVPSKDVVRKMKSYWSKLLSAKLITQRKFDNLTKAERGGLTDDDKAGFIKRQLVETRQITKHVARILDERFNTETDENNKKIRQVKIVTLKSNLVSNFRKEFELYKVREINDYHHAHDAYLNAVIGKALLGVYPQLEPEFVYGDYPHFHGHKENKATAKKFFYSNIMNFFKKDDVRTDKNGEIIWKKDEHISNIKKVLSYPQVNIVKKVEEQTGGFSKESILPKGNSDKLIPRKTKKFYWDTKKYGGFDSPIVAYSILVIADIEKGKSKKLKTVKALVGVTIMEKMTFERDPVAFLERKGYRNVQEENIIKLPKYSLFKLENGRKRLLASARELQKGNEIVLPNHLGTLLYHAKNIHKVDEPKHLDYVDKHKDEFKELLDVVSNFSKKYTLAEGNLEKIKELYAQNNGEDLKELASSFINLLTFTAIGAPATFKFFDKNIDRKRYTSTTEILNATLIHQSITGLYETRIDLNKLGGD

SEQ ID NO: 7 - protein, 1300 aa, Francisella tularensis subsp. Novicida U112
  MISC_FEATURE (1)..(1345): FnCpf1; pY004
MSIYQEFVNKYSLSKTLRFELIPQGKTLENIKARGLILDDEKRAKDYKKAKQIIDKYHQFFIEEILSSVCISEDLLQNYSDVYFKLKKSDDDNLQKDFKSAKDTIKKQISEYIKDSEKFKNLFNQNLIDAKKGQESDLILWLKQSKDNGIELFKANSDITDIDEALEIIKSFKGWTTYFKGFHENRKNVYSSNDIPTSIIYRIVDDNLPKFLENKAKYESLKDKAPEAINYEQIKKDLAEELTFDIDYKTSEVNQRVFSLDEVFEIANFNNYLNQSGITKFNTIIGGKFVNGENTKRKGINEYINLYSQQINDKTLKKYKMSVLFKQILSDTESKSFVIDKLEDDSDVVTTMQSFYEQIAAFKTVEEKSIKETLSLLFDDLKAQKLDLSKIYFKNDKSLTDLSQQVFDDYSVIGTAVLEYITQQIAPKNLDNPSKKEQELIAKKTEKAKYLSLETIKLALEEFNKHRDIDKQCRFEEILANFAAIPMIFDEIAQNKDNLAQISIKYQNQGKKDLLQASAEDDVKAIKDLLDQTNNLLHKLKIFHISQSEDKANILDKDEHFYLVFEECYFELANIVPLYNKIRNYITQKPYSDEKFKLNFENSTLANGWDKNKEPDNTAILFIKDDKYYLGVMNKKNNKIFDDKAIKENKGEGYKKIVYKLLPGANKMLPKVFFSAKSIKFYNPSEDILRIRNHSTHTKNGSPQKGYEKFEFNIEDCRKFIDFYKQSISKHPEWKDFGFRFSDTQRYNSIDEFYREVENQGYKLTFENISESYIDSVVNQGKLYLFQIYNKDFSAYSKGRPNLHTLYWKALFDERNLQDVVYKLNGEAELFYRKQSIPKKITHPAKEAIANKNKDNPKKESVFEYDLIKDKRFTEDKFFFHCPITINFKSSGANKFNDEINLLLKEKANDVHILSIDRGERHLAYYTLVDGKGNIIKQDTFNIIGNDRMKTNYHDKLAAIEKDRDSARKDWKKINNIKEMKEGYLSQVVHEIAKLVIEYNAIVVFEDLNFGFKRGRFKVEKQVYQKLEKMLIEKLNYLVFKDNEFDKTGGVLRAYQLTAPFETFKKMGKQTGIIYYVPAGFTSKICPVTGFVNQLYPKYESVSKSQEFFSKFDKICYNLDKGYFEFSFDYKNFGDKAAKGKWTIASFGSRLINFRNSDKNHNWDTREVYPTKELEKLLKDYSIEYGHGECIKAAICGESDKKFFAKLTSVLNTILQMRNSKTGTELDYLISPVADVNGNFFDSRQAPKNMPQDADANGAYHIGLKGLMLLGRIKNNQEGKKLNLVIKNEEYFEFVQNRNN

SEQ ID NO: 8 - protein, 1278 aa, Lachnospiraceae bacterium MC2017
  MISC_FEATURE (1)..(1278): Lb3Cpf1; pY005
MDYGNGQFERRAPLTKTITLRLKPIGETRETIREQKLLEQDAAFRKLVETVTPIVDDCIRKIADNALCHFGTEYDFSCLGNAISKNDSKAIKKETEKVEKLLAKVLTENLPDGLRKVNDINSAAFIQDTLTSFVQDDADKRVLIQELKGKTVLMQRFLTTRITALTVWLPDRVFENFNIFIENAEKMRILLDSPLNEKIMKFDPDAEQYASLEFYGQCLSQKDIDSYNLIISGIYADDEVKNPGINEIVKEYNQQIRGDKDESPLPKLKKLHKQILMPVEKAFFVRVLSNDSDARSILEKILKDTEMLPSKIIEAMKEADAGDIAVYGSRLHELSHVIYGDHGKLSQIIYDKESKRISELMETLSPKERKESKKRLEGLEEHIRKSTYTFDELNRYAEKNVMAAYIAAVEESCAEIMRKEKDLRTLLSKEDVKIRGNRHNTLIVKNYFNAWTVFRNLIRILRRKSEAEIDSDFYDVLDDSVEVLSLTYKGENLCRSYITKKIGSDLKPEIATYGSALRPNSRWWSPGEKFNVKFHTIVRRDGRLYYFILPKGAKPVELEDMDGDIECLQMRKIPNPTIFLPKLVFKDPEAFFRDNPEADEFVFLSGMKAPVTITRETYEAYRYKLYTVGKLRDGEVSEEEYKRALLQVLTAYKEFLENRMIYADLNFGFKDLEEYKDSSEFIKQVETHNTFMCWAKVSSSQLDDLVKSGNGLLFEIWSERLESYYKYGNEKVLRGYEGVLLSILKDENLVSMRTLLNSRPMLVYRPKESSKPMVVHRDGSRVVDRFDKDGKYIPPEVHDELYRFFNNLLIKEKLGEKARKILDNKKVKVKVLESERVKWSKFYDEQFAVTFSVKKNADCLDTTKDLNAEVMEQYSESNRLILIRNTTDILYYLVLDKNGKVLKQRSLNIINDGARDVDWKERFRQVTKDRNEGYNEWDYSRTSNDLKEVYLNYALKEIAEAVIEYNAILIIEKMSNAFKDKYSFLDDVTFKGFETKLLAKLSDLHFRGIKDGEPCSFTNPLQLCQNDSNKILQDGVIFMVPNSMTRSLDPDTGFIFAINDHNIRTKKAKLNFLSKFDQLKVSSEGCLIMKYSGDSLPTHNTDNRVWNCCCNHPITNYDRETKKVEFIEEPVEELSRVLEENGIETDTELNKLNERENVPGKVVDAIYSLVLNYLRGTVSGVAGQRAVYYSPVTGKKYDISFIQAMNLNRKCDYYRIGSKERGEWTDFVAQLINKRPAATKKAGQAKKKKGSYPYDVPDYAYPYDVPDYAYPYDVPDYA

SEQ ID NO: 9 - protein, 1345 aa, Butyrivibrio proteoclasticus
  MISC_FEATURE (1)..(1345): BpCpf1; pY006
MSIYQEFVNKYSLSKTLRFELIPQGKTLENIKARGLILDDEKRAKDYKKAKQIIDKYHQFFIEEILSSVCISEDLLQNYSDVYFKLKKSDDDNLQKDFKSAKDTIKKQISEYIKDSEKFKNLFNQNLIDAKKGQESDLILWLKQSKDNGIELFKANSDITDIDEALEIIKSFKGWTTYFKGFHENRKNVYSSNDIPTSIIYRIVDDNLPKFLENKAKYESLKDKAPEAINYEQIKKDLAEELTFDIDYKTSEVNQRVFSLDEVFEIANFNNYLNQSGITKFNTIIGGKFVNGENTKRKGINEYINLYSQQINDKTLKKYKMSVLFKQILSDTESKSFVIDKLEDDSDVVTTMQSFYEQIAAFKTVEEKSIKETLSLLFDDLKAQKLDLSKIYFKNDKSLTDLSQQVFDDYSVIGTAVLEYITQQIAPKNLDNPSKKEQELIAKKTEKAKYLSLETIKLALEEFNKHRDIDKQCRFEEILANFAAIPMIFDEIAQNKDNLAQISIKYQNQGKKDLLQASAEDDVKAIKDLLDQTNNLLHKLKIFHISQSEDKANILDKDEHFYLVFEECYFELANIVPLYNKIRNYITQKPYSDEKFKLNFENSTLANGWDKNKEPDNTAILFIKDDKYYLGVMNKKNNKIFDDKAIKENKGEGYKKIVYKLLPGANKMLPKVFFSAKSIKFYNPSEDILRIRNHSTHTKNGSPQKGYEKFEFNIEDCRKFIDFYKQSISKHPEWKDFGFRFSDTQRYNSIDEFYREVENQGYKLTFENISESYIDSVVNQGKLYLFQIYNKDFSAYSKGRPNLHTLYWKALFDERNLQDVVYKLNGEAELFYRKQSIPKKITHPAKEAIANKNKDNPKKESVFEYDLIKDKRFTEDKFFFHCPITINFKSSGANKFNDEINLLLKEKANDVHILSIDRGERHLAYYTLVDGKGNIIKQDTFNIIGNDRMKTNYHDKLAAIEKDRDSARKDWKKINNIKEMKEGYLSQVVHEIAKLVIEYNAIVVFEDLNFGFKRGRFKVEKQVYQKLEKMLIEKLNYLVFKDNEFDKTGGVLRAYQLTAPFETFKKMGKQTGIIYYVPAGFTSKICPVTGFVNQLYPKYESVSKSQEFFSKFDKICYNLDKGYFEFSFDYKNFGDKAAKGKWTIASFGSRLINFRNSDKNHNWDTREVYPTKELEKLLKDYSIEYGHGECIKAAICGESDKKFFAKLTSVLNTILQMRNSKTGTELDYLISPVADVNGNFFDSRQAPKNMPQDADANGAYHIGLKGLMLLGRIKNNQEGKKLNLVIKNEEYFEFVQNRNNKRPAATKKAGQAKKKKGSYPYDVPDYAYPYDVPDYAYPYDVPDYA

SEQ ID NO: 10 - protein, 1522 aa, Peregrinibacteria bacterium GW2011_GWA_33_10
  MISC_FEATURE (1)..(1522): PeCpf1; pY007
MSNFFKNFTNLYELSKTLRFELKPVGDTLTNMKDHLEYDEKLQTFLKDQNIDDAYQALKPQFDEIHEEFITDSLESKKAKEIDFSEYLDLFQEKKELNDSEKKLRNKIGETFNKAGEKWKKEKYPQYEWKKGSKIANGADILSCQDMLQFIKYKNPEDEKIKNYIDDTLKGFFTYFGGFNQNRANYYETKKEASTAVATRIVHENLPKFCDNVIQFKHIIKRKKDGTVEKTERKTEYLNAYQYLKNNNKITQIKDAETEKMIESTPIAEKIFDVYYFSSCLSQKQIEEYNRIIGHYNLLINLYNQAKRSEGKHLSANEKKYKDLPKFKTLYKQIGCGKKKDLFYTIKCDTEEEANKSRNEGKESHSVEEIINKAQEAINKYFKSNNDCENINTVPDFINYILTKENYEGVYWSKAAMNTISDKYFANYHDLQDRLKEAKVFQKADKKSEDDIKIPEAIELSGLFGVLDSLADWQTTLFKSSILSNEDKLKIITDSQTPSEALLKMIFNDIEKNMESFLKETNDIITLKKYKGNKEGTEKIKQWFDYTLAINRMLKYFLVKENKIKGNSLDTNISEALKTLIYSDDAEWFKWYDALRNYLTQKPQDEAKENKLKLNFDNPSLAGGWDVNKECSNFCVILKDKNEKKYLAIMKKGENTLFQKEWTEGRGKNLTKKSNPLFEINNCEILSKMEYDFWADVSKMIPKCSTQLKAVVNHFKQSDNEFIFPIGYKVTSGEKFREECKISKQDFELNNKVFNKNELSVTAMRYDLSSTQEKQYIKAFQKEYWELLFKQEKRDTKLTNNEIFNEWINFCNKKYSELLSWERKYKDALTNWINFCKYFLSKYPKTTLFNYSFKESENYNSLDEFYRDVDICSYKLNINTTINKSILDRLVEEGKLYLFEIKNQDSNDGKSIGHKNNLHTIYWNAIFENFDNRPKLNGEAEIFYRKAISKDKLGIVKGKKTKNGTEIIKNYRFSKEKFILHVPITLNFCSNNEYVNDIVNTKFYNFSNLHFLGIDRGEKHLAYYSLVNKNGEIVDQGTLNLPFTDKDGNQRSIKKEKYFYNKQEDKWEAKEVDCWNYNDLLDAMASNRDMARKNWQRIGTIKEAKNGYVSLVIRKIADLAVNNERPAFIVLEDLNTGFKRSRQKIDKSVYQKFELALAKKLNFLVDKNAKRDEIGSPTKALQLTPPVNNYGDIENKKQAGIMLYTRANYTSQTDPATGWRKTIYLKAGPEETTYKKDGKIKNKSVKDQIIETFTDIGFDGKDYYFEYDKGEFVDEKTGEIKPKKWRLYSGENGKSLDRFRGEREKDKYEWKIDKIDIVKILDDLFVNFDKNISLLKQLKEGVELTRNNEHGTGESLRFAINLIQQIRNTGNNERDNDFILSPVRDENGKHFDSREYWDKETKGEKISMPSSGDANGAFNIARKGIIMNAHILANSDSKDLSLFVSDEEWDLHLNNKTEWKKQLNIFSSRKAMAKRKKKRPAATKKAGQAKKKKGSYPYDVPDYAYPYDVPDYAYPYDVPDYA

SEQ ID NO: 11 - protein, 1397 aa, Parcubacteria bacterium GWC2011_GWC2_44_17
  MISC_FEATURE (1)..(1397): PbCpf1; pY008
MENIFDQFIGKYSLSKTLRFELKPVGKTEDFLKINKVFEKDQTIDDSYNQAKFYFDSLHQKFIDAALASDKTSELSFQNFADVLEKQNKIILDKKREMGALRKRDKNAVGIDRLQKEINDAEDIIQKEKEKIYKDVRTLFDNEAESWKTYYQEREVDGKKITFSKADLKQKGADFLTAAGILKVLKYEFPEEKEKEFQAKNQPSLFVEEKENPGQKRYIFDSFDKFAGYLTKFQQTKKNLYAADGTSTAVATRIADNFIIFHQNTKVFRDKYKNNHTDLGFDEENIFEIERYKNCLLQREIEHIKNENSYNKIIGRINKKIKEYRDQKAKDTKLTKSDFPFFKNLDKQILGEVEKEKQLIEKTREKTEEDVLIERFKEFIENNEERFTAAKKLMNAFCNGEFESEYEGIYLKNKAINTISRRWFVSDRDFELKLPQQKSKNKSEKNEPKVKKFISIAEIKNAVEELDGDIFKAVFYDKKIIAQGGSKLEQFLVIWKYEFEYLFRDIERENGEKLLGYDSCLKIAKQLGIFPQEKEAREKATAVIKNYADAGLGIFQMMKYFSLDDKDRKNTPGQLSTNFYAEYDGYYKDFEFIKYYNEFRNFITKKPFDEDKIKLNFENGALLKGWDENKEYDFMGVILKKEGRLYLGIMHKNHRKLFQSMGNAKGDNANRYQKMIYKQIADASKDVPRLLLTSKKAMEKFKPSQEILRIKKEKTFKRESKNFSLRDLHALIEYYRNCIPQYSNWSFYDFQFQDTGKYQNIKEFTDDVQKYGYKISFRDIDDEYINQALNEGKMYLFEVVNKDIYNTKNGSKNLHTLYFEHILSAENLNDPVFKLSGMAEIFQRQPSVNEREKITTQKNQCILDKGDRAYKYRRYTEKKIMFHMSLVLNTGKGEIKQVQFNKIINQRISSSDNEMRVNVIGIDRGEKNLLYYSVVKQNGEIIEQASLNEINGVNYRDKLIEREKERLKNRQSWKPVVKIKDLKKGYISHVIHKICQLIEKYSAIVVLEDLNMRFKQIRGGIERSVYQQFEKALIDKLGYLVFKDNRDLRAPGGVLNGYQLSAPFVSFEKMRKQTGILFYTQAEYTSKTDPITGFRKNVYISNSASLDKIKEAVKKFDAIGWDGKEQSYFFKYNPYNLADEKYKNSTVSKEWAIFASAPRIRRQKGEDGYWKYDRVKVNEEFEKLLKVWNFVNPKATDIKQEIIKKEKAGDLQGEKELDGRLRNFWHSFIYLFNLVLELRNSFSLQIKIKAGEVIAVDEGVDFIASPVKPFFTTPNPYIPSNLCWLAVENADANGAYNIARKGVMILKKIREHAKKDPEFKKLPNLFISNAEWDEAARDWGKYAGTTALNLDHKRPAATKKAGQAKKKKGSYPYDVPDYAYPYDVPDYAYPYDVPDYA

SEQ ID NO: 12 - protein, 1295 aa, Smithella sp. SC_K08D17
  MISC_FEATURE (1)..(1295): SsCpf1; pY009
MQTLFENFTNQYPVSKTLRFELIPQGKTKDFIEQKGLLKKDEDRAEKYKKVKNIIDEYHKDFIEKSLNGLKLDGLEKYKTLYLKQEKDDKDKKAFDKEKENLRKQIANAFRNNEKFKTLFAKELIKNDLMSFACEEDKKNVKEFEAFTTYFTGFHQNRANMYVADEKRTAIASRLIHENLPKFIDNIKIFEKMKKEAPELLSPFNQTLKDMKDVIKGTTLEEIFSLDYFNKTLTQSGIDIYNSVIGGRTPEEGKTKIKGLNEYINTDFNQKQTDKKKRQPKFKQLYKQILSDRQSLSFIAEAFKNDTEILEAIEKFYVNELLHFSNEGKSTNVLDAIKNAVSNLESFNLTKMYFRSGASLTDVSRKVFGEWSIINRALDNYYATTYPIKPREKSEKYEERKEKWLKQDFNVSLIQTAIDEYDNETVKGKNSGKVIADYFAKFCDDKETDLIQKVNEGYIAVKDLLNTPCPENEKLGSNKDQVKQIKAFMDSIMDIMHFVRPLSLKDTDKEKDETFYSLFTPLYDHLTQTIALYNKVRNYLTQKPYSTEKIKLNFENSTLLGGWDLNKETDNTAIILRKDNLYYLGIMDKRHNRIFRNVPKADKKDFCYEKMVYKLLPGANKMLPKVFFSQSRIQEFTPSAKLLENYANETHKKGDNFNLNHCHKLIDFFKDSINKHEDWKNFDFRFSATSTYADLSGFYHEVEHQGYKISFQSVADSFIDDLVNEGKLYLFQIYNKDFSPFSKGKPNLHTLYWKMLFDENNLKDVVYKLNGEAEVFYRKKSIAEKNTTIHKANESIINKNPDNPKATSTFNYDIVKDKRYTIDKFQFHIPITMNFKAEGIFNMNQRVNQFLKANPDINIIGIDRGERHLLYYALINQKGKILKQDTLNVIANEKQKVDYHNLLDKKEGDRATARQEWGVIETIKELKEGYLSQVIHKLTDLMIENNAIIVMEDLNFGFKRGRQKVEKQVYQKFEKMLIDKLNYLVDKNKKANELGGLLNAFQLANKFESFQKMGKQNGFIFYVPAWNTSKTDPATGFIDFLKPRYENLNQAKDFFEKFDSIRLNSKADYFEFAFDFKNFTEKADGGRTKWTVCTTNEDRYAWNRALNNNRGSQEKYDITAELKSLFDGKVDYKSGKDLKQQIASQESADFFKALMKNLSITLSLRHNNGEKGDNEQDYILSPVADSKGRFFDSRKADDDMPKNADANGAYHIALKGLWCLEQISKTDDLKKVKLAISNKEWLEFVQTLKGKRPAATKKAGQAKKKKGSYPYDVPDYAYPYDVPDYAYPYDVPDYA

SEQ ID NO: 13 - protein, 1352 aa, Acidaminococcus sp. BV3L6
  MISC_FEATURE (1)..(1352): AsCpf1; pY010
MTQFEGFTNLYQVSKTLRFELIPQGKTLKHIQEQGFIEEDKARNDHYKELKPIIDRIYKTYADQCLQLVQLDWENLSAAIDSYRKEKTEETRNALIEEQATYRNAIHDYFIGRTDNLTDAINKRHAEIYKGLFKAELFNGKVLKQLGTVTTTEHENALLRSFDKFTTYFSGFYENRKNVFSAEDISTAIPHRIVQDNFPKFKENCHIFTRLITAVPSLREHFENVKKAIGIFVSTSIEEVFSFPFYNQLLTQTQIDLYNQLLGGISREAGTEKIKGLNEVLNLAIQKNDETAHIIASLPHRFIPLFKQILSDRNTLSFILEEFKSDEEVIQSFCKYKTLLRNENVLETAEALFNELNSIDLTHIFISHKKLETISSALCDHWDTLRNALYERRISELTGKITKSAKEKVQRSLKHEDINLQEIISAAGKELSEAFKQKTSEILSHAHAALDQPLPTTLKKQEEKEILKSQLDSLLGLYHLLDWFAVDESNEVDPEFSARLTGIKLEMEPSLSFYNKARNYATKKPYSVEKFKLNFQMPTLASGWDVNKEKNNGAILFVKNGLYYLGIMPKQKGRYKALSFEPTEKTSEGFDKMYYDYFPDAAKMIPKCSTQLKAVTAHFQTHTTPILLSNNFIEPLEITKEIYDLNNPEKEPKKFQTAYAKKTGDQKGYREALCKWIDFTRDFLSKYTKTTSIDLSSLRPSSQYKDLGEYYAELNPLLYHISFQRIAEKEIMDAVETGKLYLFQIYNKDFAKGHHGKPNLHTLYWTGLFSPENLAKTSIKLNGQAELFYRPKSRMKRMAHRLGEKMLNKKLKDQKTPIPDTLYQELYDYVNHRLSHDLSDEARALLPNVITKEVSHEIIKDRRFTSDKFFFHVPITLNYQAANSPSKFNQRVNAYLKEHPETPIIGIDRGERNLIYITVIDSTGKILEQRSLNTIQQFDYQKKLDNREKERVAARQAWSVVGTIKDLKQGYLSQVIHEIVDLMIHYQAVVVLENLNFGFKSKRTGIAEKAVYQQFEKMLIDKLNCLVLKDYPAEKVGGVLNPYQLTDQFTSFAKMGTQSGFLFYVPAPYTSKIDPLTGFVDPFVWKTIKNHESRKHFLEGFDFLHYDVKTGDFILHFKMNRNLSFQRGLPGFMPAWDIVFEKNETQFDAKGTPFIAGKRIVPVIENHRFTGRYRDLYPANELIALLEEKGIVFRDGSNILPKLLENDDSHAIDTMVALIRSVLQMRNSNAATGEDYINSPVRDLNGVCFDSRFQNPEWPMDADANGAYHIALKGQLLLNHLKESKDLKLQNGISNQDWLAYIQELRNKRPAATKKAGQAKKKKGSYPYDVPDYAYPYDVPDYAYPYDVPDYA

SEQ ID NO: 14 - protein, 1251 aa, Lachnospiraceae bacterium MA2020
  MISC_FEATURE (1)..(1251): Lb2Cpf1; pY011
MYYESLTKQYPVSKTIRNELIPIGKTLDNIRQNNILESDVKRKQNYEHVKGILDEYHKQLINEALDNCTLPSLKIAAEIYLKNQKEVSDREDFNKTQDLLRKEVVEKLKAHENFTKIGKKDILDLLEKLPSISEDDYNALESFRNFYTYFTSYNKVRENLYSDKEKSSTVAYRLINENFPKFLDNVKSYRFVKTAGILADGLGEEEQDSLFIVETFNKTLTQDGIDTYNSQVGKINSSINLYNQKNQKANGFRKIPKMKMLYKQILSDREESFIDEFQSDEVLIDNVESYGSVLIESLKSSKVSAFFDALRESKGKNVYVKNDLAKTAMSNIVFENWRTFDDLLNQEYDLANENKKKDDKYFEKRQKELKKNKSYSLEHLCNLSEDSCNLIENYIHQISDDIENIIINNETFLRIVINEHDRSRKLAKNRKAVKAIKDFLDSIKVLERELKLINSSGQELEKDLIVYSAHEELLVELKQVDSLYNMTRNYLTKKPFSTEKVKLNFNRSTLLNGWDRNKETDNLGVLLLKDGKYYLGIMNTSANKAFVNPPVAKTEKVFKKVDYKLLPVPNQMLPKVFFAKSNIDFYNPSSEIYSNYKKGTHKKGNMFSLEDCHNLIDFFKESISKHEDWSKFGFKFSDTASYNDISEFYREVEKQGYKLTYTDIDETYINDLIERNELYLFQIYNKDFSMYSKGKLNLHTLYFMMLFDQRNIDDVVYKLNGEAEVFYRPASISEDELIIHKAGEEIKNKNPNRARTKETSTFSYDIVKDKRYSKDKFTLHIPITMNFGVDEVKRFNDAVNSAIRIDENVNVIGIDRGERNLLYVVVIDSKGNILEQISLNSIINKEYDIETDYHALLDEREGGRDKARKDWNTVENIRDLKAGYLSQVVNVVAKLVLKYNAIICLEDLNFGFKRGRQKVEKQVYQKFEKMLIDKLNYLVIDKSREQTSPKELGGALNALQLTSKFKSFKELGKQSGVIYYVPAYLTSKIDPTTGFANLFYMKCENVEKSKRFFDGFDFIRFNALENVFEFGFDYRSFTQRACGINSKWTVCTNGERIIKYRNPDKNNMFDEKVVVVTDEMKNLFEQYKIPYEDGRNVKDMIISNEEAEFYRRLYRLLQQTLQMRNSTSDGTRDYIISPVKNKREAYFNSELSDGSVPKDADANGAYNIARKGLWVLEQIRQKSEGEKINLAMTNAEWLEYAQTHLLKRPAATKKAGQAKKKKGSYPYDVPDYAYPYDVPDYAYPYDVPDYA

SEQ ID NO: 15 - protein, 1283 aa, Candidatus Methanoplasma termitum
  MISC_FEATURE (1)..(1283): CMtCpf1; pY012
MNNYDEFTKLYPIQKTIRFELKPQGRTMEHLETFNFFEEDRDRAEKYKILKEAIDEYHKKFIDEHLTNMSLDWNSLKQISEKYYKSREEKDKKVFLSEQKRMRQEIVSEFKKDDRFKDLFSKKLFSELLKEEIYKKGNHQEIDALKSFDKFSGYFIGLHENRKNMYSDGDEITAISNRIVNENFPKFLDNLQKYQEARKKYPEWIIKAESALVAHNIKMDEVFSLEYFNKVLNQEGIQRYNLALGGYVTKSGEKMMGLNDALNLAHQSEKSSKGRIHMTPLFKQILSEKESFSYIPDVFTEDSQLLPSIGGFFAQIENDKDGNIFDRALELISSYAEYDTERIYIRQADINRVSNVIFGEWGTLGGLMREYKADSINDINLERTCKKVDKWLDSKEFALSDVLEAIKRTGNNDAFNEYISKMRTAREKIDAARKEMKFISEKISGDEESIHIIKTLLDSVQQFLHFFNLFKARQDIPLDGAFYAEFDEVHSKLFAIVPLYNKVRNYLTKNNLNTKKIKLNFKNPTLANGWDQNKVYDYASLIFLRDGNYYLGIINPKRKKNIKFEQGSGNGPFYRKMVYKQIPGPNKNLPRVFLTSTKGKKEYKPSKEIIEGYEADKHIRGDKFDLDFCHKLIDFFKESIEKHKDWSKFNFYFSPTESYGDISEFYLDVEKQGYRMHFENISAETIDEYVEKGDLFLFQIYNKDFVKAATGKKDMHTIYWNAAFSPENLQDVVVKLNGEAELFYRDKSDIKEIVHREGEILVNRTYNGRTPVPDKIHKKLTDYHNGRTKDLGEAKEYLDKVRYFKAHYDITKDRRYLNDKIYFHVPLTLNFKANGKKNLNKMVIEKFLSDEKAHIIGIDRGERNLLYYSIIDRSGKIIDQQSLNVIDGFDYREKLNQREIEMKDARQSWNAIGKIKDLKEGYLSKAVHEITKMAIQYNAIVVMEELNYGFKRGRFKVEKQIYQKFENMLIDKMNYLVFKDAPDESPGGVLNAYQLTNPLESFAKLGKQTGILFYVPAAYTSKIDPTTGFVNLFNTSSKTNAQERKEFLQKFESISYSAKDGGIFAFAFDYRKFGTSKTDHKNVWTAYTNGERMRYIKEKKRNELFDPSKEIKEALTSSGIKYDGGQNILPDILRSNNNGLIYTMYSSFIAAIQMRVYDGKEDYIISPIKNSKGEFFRTDPKRRELPIDADANGAYNIALRGELTMRAIAEKFDPDSEKMAKLELKHKDWFEFMQTRGDKRPAATKKAGQAKKKKGSYPYDVPDYAYPYDVPDYAYPYDVPDYA

SEQ ID NO: 16 - protein, 1327 aa, Eubacterium eligens
  MISC_FEATURE (1)..(1327): EeCpf1; pY013
MNGNRSIVYREFVGVIPVAKTLRNELRPVGHTQEHIIQNGLIQEDELRQEKSTELKNIMDDYYREYIDKSLSGVTDLDFTLLFELMNLVQSSPSKDNKKALEKEQSKMREQICTHLQSDSNYKNIFNAKLLKEILPDFIKNYNQYDVKDKAGKLETLALFNGFSTYFTDFFEKRKNVFTKEAVSTSIAYRIVHENSLIFLANMTSYKKISEKALDEIEVIEKNNQDKMGDWELNQIFNPDFYNMVLIQSGIDFYNEICGVVNAHMNLYCQQTKNNYNLFKMRKLHKQILAYTSTSFEVPKMFEDDMSVYNAVNAFIDETEKGNIIGKLKDIVNKYDELDEKRIYISKDFYETLSCFMSGNWNLITGCVENFYDENIHAKGKSKEEKVKKAVKEDKYKSINDVNDLVEKYIDEKERNEFKNSNAKQYIREISNIITDTETAHLEYDDHISLIESEEKADEMKKRLDMYMNMYHWAKAFIVDEVLDRDEMFYSDIDDIYNILENIVPLYNRVRNYVTQKPYNSKKIKLNFQSPTLANGWSQSKEFDNNAIILIRDNKYYLAIFNAKNKPDKKIIQGNSDKKNDNDYKKMVYNLLPGANKMLPKVFLSKKGIETFKPSDYIISGYNAHKHIKTSENFDISFCRDLIDYFKNSIEKHAEWRKYEFKFSATDSYSDISEFYREVEMQGYRIDWTYISEADINKLDEEGKIYLFQIYNKDFAENSTGKENLHTMYFKNIFSEENLKDIIIKLNGQAELFYRRASVKNPVKHKKDSVLVNKTYKNQLDNGDVVRIPIPDDIYNEIYKMYNGYIKESDLSEAAKEYLDKVEVRTAQKDIVKDYRYTVDKYFIHTPITINYKVTARNNVNDMVVKYIAQNDDIHVIGIDRGERNLIYISVIDSHGNIVKQKSYNILNNYDYKKKLVEKEKTREYARKNWKSIGNIKELKEGYISGVVHEIAMLIVEYNAIIAMEDLNYGFKRGRFKVERQVYQKFESMLINKLNYFASKEKSVDEPGGLLKGYQLTYVPDNIKNLGKQCGVIFYVPAAFTSKIDPSTGFISAFNFKSISTNASRKQFFMQFDEIRYCAEKDMFSFGFDYNNFDTYNITMGKTQWTVYTNGERLQSEFNNARRTGKTKSINLTETIKLLLEDNEINYADGHDIRIDMEKMDEDKKSEFFAQLLSLYKLTVQMRNSYTEAEEQENGISYDKIISPVINDEGEFFDSDNYKESDDKECKMPKDADANGAYCIALKGLYEVLKIKSEWTEDGFDRNCLKLPHAEWLDFIQNKRYEKRPAATKKAGQAKKKKGSYPYDVPDYAYPYDVPDYAYPYDVPDYA

SEQ ID NO: 17 - protein, 1418 aa, Moraxella bovoculi 237
  MISC_FEATURE (1)..(1418): MbCpf1; pY014
MLFQDFTHLYPLSKTVRFELKPIDRTLEHIHAKNFLSQDETMADMHQKVKVILDDYHRDFIADMMGEVKLTKLAEFYDVYLKFRKNPKDDELQKQLKDLQAVLRKEIVKPIGNGGKYKAGYDRLFGAKLFKDGKELGDLAKFVIAQEGESSPKLAHLAHFEKFSTYFTGFHDNRKNMYSDEDKHTAIAYRLIHENLPRFIDNLQILTTIKQKHSALYDQIINELTASGLDVSLASHLDGYHKLLTQEGITAYNTLLGGISGEAGSPKIQGINELINSHHNQHCHKSERIAKLRPLHKQILSDGMSVSFLPSKFADDSEMCQAVNEFYRHYADVFAKVQSLFDGFDDHQKDGIYVEHKNLNELSKQAFGDFALLGRVLDGYYVDVVNPEFNERFAKAKTDNAKAKLTKEKDKFIKGVHSLASLEQAIEHYTARHDDESVQAGKLGQYFKHGLAGVDNPIQKIHNNHSTIKGFLERERPAGERALPKIKSGKNPEMTQLRQLKELLDNALNVAHFAKLLTTKTTLDNQDGNFYGEFGVLYDELAKIPTLYNKVRDYLSQKPFSTEKYKLNFGNPTLLNGWDLNKEKDNFGVILQKDGCYYLALLDKAHKKVFDNAPNTGKSIYQKMIYKYLEVRKQFPKVFFSKEAIAINYHPSKELVEIKDKGRQRSDDERLKLYRFILECLKIHPKYDKKFEGAIGDIQLFKKDKKGREVPISEKDLFDKINGIFSSKPKLEMEDFFIGEFKRYNPSQDLVDQYNIYKKIDSNDNRKKENFYNNHPKFKKDLVRYYYESMCKHEEWEESFEFSKKLQDIGCYVDVNELFTEIETRRLNYKISFCNINADYIDELVEQGQLYLFQIYNKDFSPKAHGKPNLHTLYFKALFSEDNLADPIYKLNGEAQIFYRKASLDMNETTIHRAGEVLENKNPDNPKKRQFVYDIIKDKRYTQDKFMLHVPITMNFGVQGMTIKEFNKKVNQSIQQYDEVNVIGIDRGERHLLYLTVINSKGEILEQCSLNDITTASANGTQMTTPYHKILDKREIERLNARVGWGEIETIKELKSGYLSHVVHQISQLMLKYNAIVVLEDLNFGFKRGRFKVEKQIYQNFENALIKKLNHLVLKDKADDEIGSYKNALQLTNNFTDLKSIGKQTGFLFYVPAWNTSKIDPETGFVDLLKPRYENIAQSQAFFGKFDKICYNADKDYFEFHIDYAKFTDKAKNSRQIWTICSHGDKRYVYDKTANQNKGAAKGINVNDELKSLFARHHINEKQPNLVMDICQNNDKEFHKSLMYLLKTLLALRYSNASSDEDFILSPVANDEGVFFNSALADDTQPQNADANGAYHIALKGLWLLNELKNSDDLNKVKLAIDNQTWLNFAQNRKRPAATKKAGQAKKKKGSYPYDVPDYAYPYDVPDYAYPYDVPDYA

SEQ ID NO: 18 - protein, 1308 aa, Leptospira inadai
  MISC_FEATURE (1)..(1308): LiCpf1; pY015
MEDYSGFVNIYSIQKTLRFELKPVGKTLEHIEKKGFLKKDKIRAEDYKAVKKIIDKYHRAYIEEVFDSVLHQKKKKDKTRFSTQFIKEIKEFSELYYKTEKNIPDKERLEALSEKLRKMLVGAFKGEFSEEVAEKYKNLFSKELIRNEIEKFCETDEERKQVSNFKSFTTYFTGFHSNRQNIYSDEKKSTAIGYRIIHQNLPKFLDNLKIIESIQRRFKDFPWSDLKKNLKKIDKNIKLTEYFSIDGFVNVLNQKGIDAYNTILGGKSEESGEKIQGLNEYINLYRQKNNIDRKNLPNVKILFKQILGDRETKSFIPEAFPDDQSVLNSITEFAKYLKLDKKKKSIIAELKKFLSSFNRYELDGIYLANDNSLASISTFLFDDWSFIKKSVSFKYDESVGDPKKKIKSPLKYEKEKEKWLKQKYYTISFLNDAIESYSKSQDEKRVKIRLEAYFAEFKSKDDAKKQFDLLERIEEAYAIVEPLLGAEYPRDRNLKADKKEVGKIKDFLDSIKSLQFFLKPLLSAEIFDEKDLGFYNQLEGYYEEIDSIGHLYNKVRNYLTGKIYSKEKFKLNFENSTLLKGWDENREVANLCVIFREDQKYYLGVMDKENNTILSDIPKVKPNELFYEKMVYKLIPTPHMQLPRIIFSSDNLSIYNPSKSILKIREAKSFKEGKNFKLKDCHKFIDFYKESISKNEDWSRFDFKFSKTSSYENISEFYREVERQGYNLDFKKVSKFYIDSLVEDGKLYLFQIYNKDFSIFSKGKPNLHTIYFRSLFSKENLKDVCLKLNGEAEMFFRKKSINYDEKKKREGHHPELFEKLKYPILKDKRYSEDKFQFHLPISLNFKSKERLNFNLKVNEFLKRNKDINIIGIDRGERNLLYLVMINQKGEILKQTLLDSMQSGKGRPEINYKEKLQEKEIERDKARKSWGTVENIKELKEGYLSIVIHQISKLMVENNAIVVLEDLNIGFKRGRQKVERQVYQKFEKMLIDKLNFLVFKENKPTEPGGVLKAYQLTDEFQSFEKLSKQTGFLFYVPSWNTSKIDPRTGFIDFLHPAYENIEKAKQWINKFDSIRFNSKMDWFEFTADTRKFSENLMLGKNRVWVICTTNVERYFTSKTANSSIQYNSIQITEKLKELFVDIPFSNGQDLKPEILRKNDAVFFKSLLFYIKTTLSLRQNNGKKGEEEKDFILSPVVDSKGRFFNSLEASDDEPKDADANGAYHIALKGLMNLLVLNETKEENLSRPKWKIKNKDWLEFVWERNRKRPAATKKAGQAKKKKGSYPYDVPDYAYPYDVPDYAYPYDVPDYA

SEQ ID NO: 19 - protein, 1272 aa, Lachnospiraceae bacterium ND2006
  MISC_FEATURE (1)..(1272): LbCpf1; pY016
SKLEKFTNCYSLSKTLRFKAIPVGKTQENIDNKRLLVEDEKRAEDYKGVKKLLDRYYLSFINDVLHSIKLKNLNNYISLFRKKTRTEKENKELENLEINLRKEIAKAFKGNEGYKSLFKKDIIETILPEFLDDKDEIALVNSFNGFTTAFTGFFDNRENMFSEEAKSTSIAFRCINENLTRYISNMDIFEKVDAIFDKHEVQEIKEKILNSDYDVEDFFEGEFFNFVLTQEGIDVYNAIIGGFVTESGEKIKGLNEYINLYNQKTKQKLPKFKPLYKQVLSDRESLSFYGEGYTSDEEVLEVFRNTLNKNSEIFSSIKKLEKLFKNFDEYSSAGIFVKNGPAISTISKDIFGEWNVIRDKWNAEYDDIHLKKKAVVTEKYEDDRRKSFKKIGSFSLEQLQEYADADLSVVEKLKEIIIQKVDEIYKVYGSSEKLFDADFVLEKSLKKNDAVVAIMKDLLDSVKSFENYIKAFFGEGKETNRDESFYGDFVLAYDILLKVDHIYDAIRNYVTQKPYSKDKFKLYFQNPQFMGGWDKDKETDYRATILRYGSKYYLAIMDKKYAKCLQKIDKDDVNGNYEKINYKLLPGPNKMLPKVFFSKKWMAYYNPSEDIQKIYKNGTFKKGDMFNLNDCHKLIDFFKDSISRYPKWSNAYDFNFSETEKYKDIAGFYREVEEQGYKVSFESASKKEVDKLVEEGKLYMFQIYNKDFSDKSHGTPNLHTMYFKLLFDENNHGQIRLSGGAELFMRRASLKKEELVVHPANSPIANKNPDNPKKTTTLSYDVYKDKRFSEDQYELHIPIAINKCPKNIFKINTEVRVLLKHDDNPYVIGIDRGERNLLYIVVVDGKGNIVEQYSLNEIINNFNGIRIKTDYHSLLDKKEKERFEARQNWTSIENIKELKAGYISQVVHKICELVEKYDAVIALEDLNSGFKNSRVKVEKQVYQKFEKMLIDKLNYMVDKKSNPCATGGALKGYQITNKFESFKSMSTQNGFIFYIPAWLTSKIDPSTGFVNLLKTKYTSIADSKKFISSFDRIMYVPEEDLFEFALDYKNFSRTDADYIKKWKLYSYGNRIRIFRNPKKNNVFDWEEVCLTSAYKELFNKYGINYQQGDIRALLCEQSDKAFYSSFMALMSLMLQMRNSITGRTDVDFLISPVKNSDGIFYDSRNYEAQENAILPKNADANGAYNIARKVLWAIGQFKKAEDEKLDKVKIAISNKEWLEYAQTSVKHKRPAATKKAGQAKKKKGSYPYDVPDYAYPYDVPDYAYPYDVPDYA

SEQ ID NO: 20 - protein, 1305 aa, Porphyromonas crevioricanis
  MISC_FEATURE (1)..(1305): PcCpf1; pY017
MDSLKDFTNLYPVSKTLRFELKPVGKTLENIEKAGILKEDEHRAESYRRVKKIIDTYHKVFIDSSLENMAKMGIENEIKAMLQSFCELYKKDHRTEGEDKALDKIRAVLRGLIVGAFTGVCGRRENTVQNEKYESLFKEKLIKEILPDFVLSTEAESLPFSVEEATRSLKEFDSFTSYFAGFYENRKNIYSTKPQSTAIAYRLIHENLPKFIDNILVFQKIKEPIAKELEHIRADFSAGGYIKKDERLEDIFSLNYYIHVLSQAGIEKYNALIGKIVTEGDGEMKGLNEHINLYNQQRGREDRLPLFRPLYKQILSDREQLSYLPESFEKDEELLRALKEFYDHIAEDILGRTQQLMTSISEYDLSRIYVRNDSQLTDISKKMLGDWNAIYMARERAYDHEQAPKRITAKYERDRIKALKGEESISLANLNSCIAFLDNVRDCRVDTYLSTLGQKEGPHGLSNLVENVFASYHEAEQLLSFPYPEENNLIQDKDNVVLIKNLLDNISDLQRFLKPLWGMGDEPDKDERFYGEYNYIRGALDQVIPLYNKVRNYLTRKPYSTRKVKLNFGNSQLLSGWDRNKEKDNSCVILRKGQNFYLAIMNNRHKRSFENKMLPEYKEGEPYFEKMDYKFLPDPNKMLPKVFLSKKGIEIYKPSPKLLEQYGHGTHKKGDTFSMDDLHELIDFFKHSIEAHEDWKQFGFKFSDTATYENVSSFYREVEDQGYKLSFRKVSESYVYSLIDQGKLYLFQIYNKDFSPCSKGTPNLHTLYWRMLFDERNLADVIYKLDGKAEIFFREKSLKNDHPTHPAGKPIKKKSRQKKGEESLFEYDLVKDRRYTMDKFQFHVPITMNFKCSAGSKVNDMVNAHIREAKDMHVIGIDRGERNLLYICVIDSRGTILDQISLNTINDIDYHDLLESRDKDRQQEHRNWQTIEGIKELKQGYLSQAVHRIAELMVAYKAVVALEDLNMGFKRGRQKVESSVYQQFEKQLIDKLNYLVDKKKRPEDIGGLLRAYQFTAPFKSFKEMGKQNGFLFYIPAWNTSNIDPTTGFVNLFHVQYENVDKAKSFFQKFDSISYNPKKDWFEFAFDYKNFTKKAEGSRSMWILCTHGSRIKNFRNSQKNGQWDSEEFALTEAFKSLFVRYEIDYTADLKTAIVDEKQKDFFVDLLKLFKLTVQMRNSWKEKDLDYLISPVAGADGRFFDTREGNKSLPKDADANGAYNIALKGLWALRQIRQTSEGGKLKLAISNKEWLQFVQERSYEKDKRPAATKKAGQAKKKKGSYPYDVPDYAYPYDVPDYAYPYDVPDYA

SEQ ID NO: 21 - protein, 1368 aa, Prevotella disiens
  MISC_FEATURE (1)..(1368): PdCpf1; pY018
MENYQEFTNLFQLNKTLRFELKPIGKTCELLEEGKIFASGSFLEKDKVRADNVSYVKKEIDKKHKIFIEETLSSFSISNDLLKQYFDCYNELKAFKKDCKSDEEEVKKTALRNKCTSIQRAMREAISQAFLKSPQKKLLAIKNLIENVFKADENVQHFSEFTSYFSGFETNRENFYSDEEKSTSIAYRLVHDNLPIFIKNIYIFEKLKEQFDAKTLSEIFENYKLYVAGSSLDEVFSLEYFNNTLTQKGIDNYNAVIGKIVKEDKQEIQGLNEHINLYNQKHKDRRLPFFISLKKQILSDREALSWLPDMFKNDSEVIKALKGFYIEDGFENNVLTPLATLLSSLDKYNLNGIFIRNNEALSSLSQNVYRNFSIDEAIDANAELQTFNNYELIANALRAKIKKETKQGRKSFEKYEEYIDKKVKAIDSLSIQEINELVENYVSEFNSNSGNMPRKVEDYFSLMRKGDFGSNDLIENIKTKLSAAEKLLGTKYQETAKDIFKKDENSKLIKELLDATKQFQHFIKPLLGTGEEADRDLVFYGDFLPLYEKFEELTLLYNKVRNRLTQKPYSKDKIRLCFNKPKLMTGWVDSKTEKSDNGTQYGGYLFRKKNEIGEYDYFLGISSKAQLFRKNEAVIGDYERLDYYQPKANTIYGSAYEGENSYKEDKKRLNKVIIAYIEQIKQTNIKKSIIESISKYPNISDDDKVTPSSLLEKIKKVSIDSYNGILSFKSFQSVNKEVIDNLLKTISPLKNKAEFLDLINKDYQIFTEVQAVIDEICKQKTFIYFPISNVELEKEMGDKDKPLCLFQISNKDLSFAKTFSANLRKKRGAENLHTMLFKALMEGNQDNLDLGSGAIFYRAKSLDGNKPTHPANEAIKCRNVANKDKVSLFTYDIYKNRRYMENKFLFHLSIVQNYKAANDSAQLNSSATEYIRKADDLHIIGIDRGERNLLYYSVIDMKGNIVEQDSLNIIRNNDLETDYHDLLDKREKERKANRQNWEAVEGIKDLKKGYLSQAVHQIAQLMLKYNAIIALEDLGQMFVTRGQKIEKAVYQQFEKSLVDKLSYLVDKKRPYNELGGILKAYQLASSITKNNSDKQNGFLFYVPAWNTSKIDPVTGFTDLLRPKAMTIKEAQDFFGAFDNISYNDKGYFEFETNYDKFKIRMKSAQTRWTICTFGNRIKRKKDKNYWNYEEVELTEEFKKLFKDSNIDYENCNLKEEIQNKDNRKFFDDLIKLLQLTLQMRNSDDKGNDYIISPVANAEGQFFDSRNGDKKLPLDADANGAYNIARKGLWNIRQIKQTKNDKKLNLSISSTEWLDFVREKPYLKKRPAATKKAGQAKKKKGSYPYDVPDYAYPYDVPDYAYPYDVPDYA

SEQ ID NO: 22 - protein, 1291 aa, Porphyromonas macacae
  MISC_FEATURE (1)..(1291): PmCpf1; pY09
MKTQHFFEDFTSLYSLSKTIRFELKPIGKTLENIKKNGLIRRDEQRLDDYEKLKKVIDEYHEDFIANILSSFSFSEEILQSYIQNLSESEARAKIEKTMRDTLAKAFSEDERYKSIFKKELVKKDIPVWCPAYKSLCKKFDNFTTSLVPFHENRKNLYTSNEITASIPYRIVHVNLPKFIQNIEALCELQKKMGADLYLEMMENLRNVWPSFVKTPDDLCNLKTYNHLMVQSSISEYNRFVGGYSTEDGTKHQGINEWINIYRQRNKEMRLPGLVFLHKQILAKVDSSSFISDTLENDDQVFCVLRQFRKLFWNTVSSKEDDAASLKDLFCGLSGYDPEAIYVSDAHLATISKNIFDRWNYISDAIRRKTEVLMPRKKESVERYAEKISKQIKKRQSYSLAELDDLLAHYSEESLPAGFSLLSYFTSLGGQKYLVSDGEVILYEEGSNIWDEVLIAFRDLQVILDKDFTEKKLGKDEEAVSVIKKALDSALRLRKFFDLLSGTGAEIRRDSSFYALYTDRMDKLKGLLKMYDKVRNYLTKKPYSIEKFKLHFDNPSLLSGWDKNKELNNLSVIFRQNGYYYLGIMTPKGKNLFKTLPKLGAEEMFYEKMEYKQIAEPMLMLPKVFFPKKTKPAFAPDQSVVDIYNKKTFKTGQKGFNKKDLYRLIDFYKEALTVHEWKLFNFSFSPTEQYRNIGEFFDEVREQAYKVSMVNVPASYIDEAVENGKLYLFQIYNKDFSPYSKGIPNLHTLYWKALFSEQNQSRVYKLCGGGELFYRKASLHMQDTTVHPKGISIHKKNLNKKGETSLFNYDLVKDKRFTEDKFFFHVPISINYKNKKITNVNQMVRDYIAQNDDLQIIGIDRGERNLLYISRIDTRGNLLEQFSLNVIESDKGDLRTDYQKILGDREQERLRRRQEWKSIESIKDLKDGYMSQVVHKICNMVVEHKAIVVLENLNLSFMKGRKKVEKSVYEKFERMLVDKLNYLVVDKKNLSNEPGGLYAAYQLTNPLFSFEELHRYPQSGILFFVDPWNTSLTDPSTGFVNLLGRINYTNVGDARKFFDRFNAIRYDGKGNILFDLDLSRFDVRVETQRKLWTLTTFGSRIAKSKKSGKWMVERIENLSLCFLELFEQFNIGYRVEKDLKKAILSQDRKEFYVRLIYLFNLMMQIRNSDGEEDYILSPALNEKNLQFDSRLIEAKDLPVDADANGAYNVARKGLMVVQRIKRGDHESIHRIGRAQWLRYVQEGIVEKRPAATKKAGQAKKKKGSYPYDVPDYAYPYDVPDYAYPYDVPDYA

SEQ ID NO: 23 - protein, 7 aa, Artificial Sequence
  NLS sequence
PKKKRKV

SEQ ID NO: 24 - protein, 5 aa, Artificial Sequence
  NLS of the yeast transcription repressor Matalpha2
KIPIK

SEQ ID NO: 25 - protein, 5 aa, Artificial Sequence
  NLS motif from Notch1 protein
RKRRR

SEQ ID NO: 26 - protein, 5 aa, Artificial Sequence
  NLS from Notch 2 protein
KRKRK

SEQ ID NO: 27 - protein, 4 aa, Artificial Sequence
  NLS motif from Notch3 protein
RRKR

SEQ ID NO: 28 - protein, 5 aa, Artificial Sequence
  NLS motif
RRRRR

SEQ ID NO: 29 - DNA, 5930 bp, Artificial Sequence
  pWD006 encoding for FnCpf1
cagcccagcttggagcgaacgacctacaccgaactgagatacctacagcgtgagctatgagaaagcgccacgcttcccgaagggagaaaggcggacaggtatccggtaagcggcagggtcggaacaggagagcgcacgagggagcttccagggggaaacgcctggtatctttatagtcctgtcgggtttcgccacctctgacttgagcgtcgatttttgtgatgctcgtcaggggggcggagcctatggaaaaacgccagcaacgcggcctttttacggttcctggccttttgctggccttttgctcacatgttctttcctgcgttatcccctgattctgtggataaccgtagtcggtctcaaacgtttacactttatgcttccggctcgtatgttaggaggtctttatcatgagcatctaccaagagttcgttaacaagtacagcctgagcaagaccctgcgcttcgaactgatcccgcagggcaaaaccctggaaaatattaaagcgcgtggcctgattctggacgatgaaaaacgtgcgaaagactataaaaaagcgaaacagatcatcgataaataccaccagttcttcattgaagaaatcctgagctccgtttgcatctctgaggacctgctgcaaaactattccgatgtgtacttcaaactgaagaaatccgacgacgacaacctgcaaaaagatttcaaaagcgcgaaggataccattaaaaaacaaatctccgaatatatcaaagatagcgagaaatttaagaacctgttcaaccagaacctgatcgatgcgaaaaaaggccaggagtctgacctgatcctgtggctgaagcagagcaaagacaacggtatcgaactgttcaaagcgaactctgacatcaccgatattgatgaggcgctggaaatcatcaagtctttcaaaggctggactacgtacttcaaaggcttccacgaaaaccgcaaaaacgtgtattcttctaacgatatcccgactagcatcatctaccgcattgtagacgataacctgccaaaattcctggaaaacaaagcgaagtacgaaagcctgaaagacaaagctccggaggctattaactacgaacagatcaagaaagacctggctgaagaactgaccttcgacatcgattataaaacctctgaagtcaaccagcgtgtattctccctggatgaagttttcgagatcgcgaacttcaacaattacctgaaccagtccggtattaccaaattcaataccatcatcggcggcaaatttgtcaacggtgaaaataccaaacgcaaaggcattaacgaatacattaacctgtatagccagcagatcaatgacaagactctgaaaaaatacaaaatgagcgtgctgttcaaacagatcctgtctgacaccgaatctaaatccttcgttattgacaaactggaagatgatagcgacgttgttaccaccatgcaatccttttacgaacagattgcggccttcaagaccgtagaggaaaaatctattaaagaaactctgtctctgctgtttgatgacctgaaagcccagaagctggatctgtccaaaatctacttcaaaaacgataaaagcctgactgatctgtctcaacaggttttcgatgactatagcgtaattggcaccgctgtgctggagtacatcacgcaacaaatcgctccgaaaaacctggataacccaagcaaaaaggaacaagaactgatcgcaaaaaagacggaaaaggctaaatacctgagcctggaaaccattaaactggcgctggaagaatttaacaaacaccgtgacattgacaaacagtgccgttttgaagagattctggccaacttcgccgcaatcccgatgatctttgacgaaatcgcgcagaacaaagataatctggcgcaaatctccattaaataccagaaccagggtaaaaaggacctgctgcaagcgagcgctgaagatgatgtcaaagccattaaggatctgctggaccagactaacaacctgctgcataaactgaaaatcttccacatcagccagtctgaagataaagccaatatcctggacaaagacgaacatttctacctggtgttcgaagaatgctatttcgaactggcaaacattgtgccgctgtacaacaaaattcgtaactacatcacccagaaaccgtactctgacgagaaattcaaactgaacttcgaaaactctaccctggccaacggttgggacaaaaacaaagaaccagataacactgccattctgttcatcaaagacgataaatattacctgggcgttatgaacaaaaagaataacaaaatcttcgatgacaaagcgatcaaagaaaacaagggtgagggttataaaaagattgtgtacaaactgctgccaggtgcaaacaaaatgctgccgaaggttttcttctccgcgaaatccattaaattctacaacccgtctgaggacatcctgcgtatccgtaaccacagcactcacaccaaaaatggttctccgcagaaaggttatgagaaattcgagttcaacatcgaggactgccgtaaattcatcgatttttacaagcagtctatttctaagcacccggagtggaaagatttcggcttccgcttcagcgatacccagcgctacaactccattgacgagttctaccgtgaagttgagaaccagggctataagctgaccttcgagaacatcagcgaatcctatatcgattccgttgtgaaccagggcaaactgtacctgttccaaatctacaataaggatttctctgcttactctaaaggccgtccgaacctgcacactctgtattggaaagccctgttcgatgaacgtaacctgcaagacgttgtatacaaactgaacggtgaagcagaactgttctatcgtaaacagtctatcccgaaaaaaattacccacccggctaaagaagcgattgcgaacaaaaacaaggacaacccgaaaaaggaaagcgtttttgaatacgacctgatcaaagataaacgcttcacggaggacaaatttttctttcactgtccaatcaccattaacttcaaatcttctggcgcgaacaaattcaacgacgaaatcaatctgctgctgaaagaaaaagctaacgacgttcacattctgagcattgatcgtggtgaacgccatctggcgtattacaccctggtcgacggcaaaggtaacatcatcaaacaggacactttcaacatcatcggtaacgatcgtatgaaaactaactaccacgataaactggccgcgatcgaaaaagaccgtgattctgcacgcaaagattggaaaaaaattaacaacatcaaagaaatgaaagaaggttacctgtcccaggttgtacacgaaatcgctaaactggtgatcgagtacaacgctatcgtggtattcgaggacctgaacttcggtttcaaacgtggtcgcttcaaagttgaaaaacaagtttaccagaaactggagaaaatgctgatcgagaaactgaactacctggtgttcaaagacaatgagttcgacaaaactggcggcgtactgcgcgcataccagctgaccgcaccgttcgaaactttcaaaaaaatgggcaaacagactggcattatttactacgtgccagctggttttacctctaagatttgcccggttaccggtttcgttaaccaactgtatccgaaatatgagtctgtgagcaaaagccaggaatttttctccaaattcgacaaaatctgttacaacctggataagggttactttgagttctctttcgattataaaaactttggcgacaaagcggctaaaggtaaatggaccattgcgagcttcggtagccgtctgattaattttcgcaactccgacaaaaaccacaactgggacacccgcgaagtttacccgactaaagaactggaaaaactgctgaaagattactccatcgaatacggtcacggcgaatgcatcaaggccgccatttgcggtgagtctgacaaaaaatttttcgccaaactgacctccgttctgaacactatcctgcaaatgcgtaacagcaagaccggcaccgaactggactatctgatctctccggttgcggacgtaaacggcaactttttcgatagccgccaggctccgaaaaacatgccgcaggacgcagacgcgaacggcgcgtaccacatcggcctgaagggcctgatgctgctgggtcgcatcaaaaacaaccaggaaggcaaaaaactgaacctggttattaaaaacgaagaatattttgaatttgtacagaaccgtaacaactgattgacagctagctcagtcctaggtataatgctagcgctgatttaggcaaaaacgggtctaagaactttaaataatttctactgttgtagatgagaagtcatttaataaggccactgttaaaagtctaagaactttaaataatttctactgttgtagatgctactattcctgtgccttcagataattcagtctaagaactttaaataatttctactgttgtagatgtctagagccttttgtattagtagccggtctaagaactttaaataatttctactgttgtagattagcgatttatgaaggtcatttttttgtctgctgtgagaccagaccaataaaaaacgcccggcggcaaccgagcgttctgaacaaatccagatggagttctgaggtcattactggatctatcaacaggagtccaagcgagctcgatatcaaattacgccccgccctgccactcatcgcagtactgttgtaattcattaagcattctgccgacatggaagccatcacaaacggcatgatgaacctgaatcgccagcggcatcagcaccttgtcgccttgcgtataatatttgcccatggtgaaaacgggggcgaagaagttgtccatattggccacgtttaaatcaaaactggtgaaactcacccagggattggctgaaacgaaaaacatattctcaataaaccctttagggaaataggccaggttttcaccgtaacacgccacatcttgcgaatatatgtgtagaaactgccggaaatcgtcgtggtattcactccagagcgatgaaaacgtttcagtttgctcatggaaaacggtgtaacaagggtgaacactatcccatatcaccagctcaccgtctttcattgccatacgaaattccggatgagcattcatcaggcgggcaagaatgtgaataaaggccggataaaacttgtgcttatttttctttacggtctttaaaaaggccgtaatatccagctgaacggtctggttataggtacattgagcaactgactgaaatgcctcaaaatgttctttacgatgccattgggatatatcaacggtggtatatccagtgatttttttctccattttagcttccttagctcctgaaaatctcgataactcaaaaaatacgcccggtagtgatcttatttcattatggtgaaagttggaacctcttacgtgcccgatcaatcatgaccaaaatcccttaacgtgagttttcgttccactgagcgtcagaccccgtagaaaagatcaaaggatcttcttgagatcctttttttctgcgcgtaatctgctgcttgcaaacaaaaaaaccaccgctaccagcggtggtttgtttgccggatcaagagctaccaactctttttccgaaggtaactggcttcagcagagcgcagataccaaatactgttcttctagtgtagccgtagttaggccaccacttcaagaactctgtagcaccgcctacatacctcgctctgctaatcctgttaccagtggctgctgccagtggcgataagtcgtgtcttaccgggttggactcaagacgatagttaccggataaggcgcagcggtcgggctgaacggggggttcgtgcaca

SEQ ID NO: 30 - DNA, 31 bp, Artificial Sequence
  Guide sequence targeting Wild Type PAM plasmid
gagaagtcatttaataaggccactgttaaaa

SEQ ID NO: 31 - RNA, 37 nt, Artificial Sequence
  Example crRNA sequence
aauuucuacuguuguagaugagaagucauuuaauaag

SEQ ID NO: 32 - DNA, 37 bp, Artificial Sequence
  Example target DNA sequence
  misc_feature (1)..(10): n is a, c, g, or t
nnnnnnnnnngaagtcttattaaatgacttctcgaaa

SEQ ID NO: 33 - DNA, 37 bp, Artificial Sequence
  Example target DNA sequence
  misc_feature (28)..(37): n is a, c, g, or t
tttcgagaagtcatttaataaggaagtnnnnnnnnnn

SEQ ID NO: 34 - DNA, 16 bp, Artificial Sequence
  Example sticky end after Cpf1 digestion
  misc_feature (6)..(16): n is a, c, g, or t
acttcnnnnnnnnnnn

SEQ ID NO: 35 - DNA, 15 bp, Artificial Sequence
  Example sticky end after Cpf1 digestion
  misc_feature (6)..(15): n is a, c, g, or t
gaagtnnnnnnnnnn

SEQ ID NO: 36 - DNA, 25 bp, Artificial Sequence
  Scarless cloning ligation
  misc_feature (1)..(10): n is a, c, g, or t
  misc_feature (16)..(25): n is a, c, g, or t
nnnnnnnnnngaagtnnnnnnnnnn

SEQ ID NO: 37 - protein, 399 aa, Francisella philomiragia subsp.
  MISC_FEATURE (1)..(399): Genbank ABZ87876 Cpf1
MFYLKQILSDTESKSFVIDKLEDDSDVVTTIQSFYEQIAAFKTLEEKSIKETLSLLFDDLKAQKLDLSKIYFKNDKSLTDLSQQVFDDYSLIGTSVLEYITQQVAPKNLDNPSKKEQELIAKKTEKAKYLSLETIRDALNEFNKHRDIDKQCRFEEIFASFADIPVLFDEIAQNKNNLAQISIKYQNQGKKDLLQTSAEVDVKAIKDLLDQTNNLLHKLKIFHITQSEDKANILDKDEHFYLVFDECYFELANIVPLYNKIRNYITQKPYSDEKFKLNFENSTLANGWDKNKEPDNTAILFIKDDKYYLGVMNKKNNKIFDDKAIKENKGEGYKKVVYKLLPGANKMLPKVFFSAKSINFYNPSEDILRIRNHSTHTKNGSPQKDMKNLSLILKIAENL

SEQ ID NO: 38 - protein, 485 aa, Francisella philomiragia subsp.
  MISC_FEATURE (1)..(485): Genbank ABZ87877 Cpf1
MVYKLNGEAELFYRKQSIPKKITHPAKQAIANKNKDNPKKESFFEYDLIKDKRFTEDKFFFHCPITMNFKSSGANKFNDEVNLLLKEKANDVHILSIDRGERHLAYYTLVDSKGNIIKQDTFNIIGNDRMKTNYHDKLAAIEKDRESARKDWKKINNIKEMKEGYLSQVVHEIAKLVIEYNAIVVFEDLNFGFKRGRFKVEKQVYQKLEKMLIEKLNYLVFKDNEFDKAGGVLRAYQLTAPFETFKKMGKQTGVIYYVPAGFTSKICPVTGFVNQLYPKYESVSKSQEFFSKFDKICYNLDKGYFEFSFDYKNFGDKAAKGKWTIASFGSRLINFRNSDKNHNWDTREVYPTKELEKLLKDYSIEYGHGECIKAAICGESDKKFFAKLTSILNSILQMRNSKTGTELDYLISPVADVNGNFFDSRHAPKNMPQDADANGAYHIGLKGLMLLYRIKNNQDGKKLNLVIKNEEYFEFVQNRNKSSKI

SEQ ID NO: 39 - protein, 939 aa, Francisella philomiragia subsp.
  MISC_FEATURE (1)..(939): Genbank AJI56734 Cpf1
MNLYSNLTNKYSLSKTLRFELIPQGETLENIKARGLILDDEKRAKDYKKAKQIIDKYHQFFIEEILSSVCISEDLLQNYSDVYFKLKKSDDDNLQKDFKSAKDTIKKHISRYINDSEKFKNLFNQNLIDAKKGQESDLILWLKQSKDNGIELFKANSDITDIDEALEIIKSFKGWTTYFKGFHENRKNVYSSDDIPTSIIYRIVDDNLPKFIENKAKYENLKDKAPEAINYEQIKKDLAEELTFDIDYKTSEVNQRVFSLDEVFEIANFNNYLNQSGITKFNTIIGGKFVNGENTKRKGINEYINLYSQQINDKTLKKYKMSVLFKQILSDTESKSFVIDKLEDDSDVVTTMQSFYEQIAAFKTLEEKSIKETLSLLFDDLKAQKLDLSKIYFKNDKSLTDLSQQVFDDYSVIGTAVLEYITQQVAPKNLDNPSKKEQDLIAKKTEKAKYLSLETIKLALEEFNKYRDIDKQCRFEEIFASFADIPVLFDEIAQNKNNLAQISIKYQNQGKKDLLQTSAEVDVKAIKDLLDQTNNLLHKLKIFHITQSEDKANILDKDEHFYLVFDECYFELANIVALYNKIRNYITQKPYSDEKFKLNFENSTLANGWDKNKEPDNTAILFIKDDKYYLGVMNKKNNKIFDDKAIKENKGEGYKKVVYKLLPGANKMLPKVFFSAKSINFYNPSEDILRIRNHSTHTKNGSPQKGYEKLEFNIEDCRKFIDFYKHSISRHPEWKDFGFRFSDTKKYNSIDEFYREVENQGYKLTFENISESYIDSLVDEGKLYLFQIYNKDFSVYSKGKPNLHTLYWKALFDERNLQDVVYKLNGEAELFYRKQSIPKKITHPAKEAIANKNKDNPKKESIFEYDLIKDKRFTEDKFFFHCPITINFKSSGANKFNDEINLLLKEKANDVHILSIDRGERHLAYYTLVDGKGNIICKN

SEQ ID NO: 40 - protein, 1261 aa, Moraxella bovoculi
  MISC_FEATURE (1)..(1261): Genbank AKG08867 Cpf1
MLFQDFTHLYPLSKTVRFELKPIGKTLEHIHAKNFLNQDETMADMYQKVKAILDDYHRDFIADMMGEVKLTKLAEFYDVYLKFRKNPKDDGLQKQLKDLQAVLRKEIVKPIGNGGKYKAGYDRLFGAKLFKDGKELGDLAKFVIAQEGESSPKLAHLAHFEKFSTYFTGFHDNRKNMYSDEDKHTAIAYRLIHENLPRFIDNLQILATIKQKHSALYDQIINELTASGLDVSLASHLDGYHKLLTQEGITAYNTLLGGISGEAGSRKIQGINELINSHHNQHCHKSERIAKLRPLHKQILSDGMGVSFLPSKFADDSEVCQAVNEFYRHYADVFAKVQSLFDGFDDYQKDGIYVEYKNLNELSKQAFGDFALLGRVLDGYYVDVVNPEFNERFAKAKTDNAKAKLTKEKDKFIKGVHSLASLEQAIEHYTARHDDESVQAGKLGQYFKHGLAGVDNPIQKIHNNHSTIKGFLERERPAGERALPKIKSDKSPEIRQLKELLDNALNVAHFAKLLTTKTTLHNQDGNFYGEFGALYDELAKIATLYNKVRDYLSQKPFSTEKYKLNFGNPTLLNGWDLNKEKDNFGVILQKDGCYYLALLDKAHKKVFDNAPNTGKSVYQKMIYKLLPGPNKMLPKVFFAKSNLDYYNPSAELLDKYAQGTHKKGDNFNLKDCHALIDFFKAGINKHPEWQHFGFKFSPTSSYQDLSDFYREVEPQGYQVKFVDINADYINELVEQGQLYLFQIYNKDFSPKAHGKPNLHTLYFKALFSEDNLVNPIYKLNGEAEIFYRKASLDMNETTIHRAGEVLENKNPDNPKKRQFVYDIIKDKRYTQDKFMLHVPITMNFGVQGMTIKEFNKKVNQSIQQYDEVNVIGIDRGERHLLYLTVINSKGEILEQRSLNDITTASANGTQMTTPYHKILDKREIERLNARVGWGEIETIKELKSGYLSHVVHQISQLMLKYNAIVVLEDLNFGFKRGRFKVEKQIYQNFENALIKKLNHLVLKDKADDEIGSYKNALQLTNNFTDLKSIGKQTGFLFYVPAWNTSKIDPETGFVDLLKPRYENIAQSQAFFGKFDKICYNADRGYFEFHIDYAKFNDKAKNSRQIWKICSHGDKRYVYDKTANQNKGATIGVNVNDELKSLFTRYHINDKQPNLVMDICQNNDKEFHKSLMYLLKTLLALRYSNASSDEDFILSPVANDEGVFFNSALADDTQPQNADANGAYHIALKGLWLLNELKNSDDLNKVKLAIDNQTWLNFAQNR

SEQ ID NO: 41 - protein, 1282 aa, Eubacterium eligens
  MISC_FEATURE (1)..(1282): Genbank CDA41776 Cpf1
MNGNRSIVYREFVGVTPVAKTLRNELRPVGHTQEHIIQNGLIQEDELRQEKSTELKNIMDDYYREYIDKSLSGLTDLDFTLLFELMNSVQSSLSKDNKKALEKEHNKMREQICTHLQSDSDYKNMFNAKLFKEILPDFIKNYNQYDVKDKAGKLETLALFNGFSTYFTDFFEKRKNVFTKEAVSTSIAYRIVHENSLIFLANMTSYKKISEKALDEIEVIEKNNQDKMGDWELNQIFNPDFYNMVLIQSGIDFYNEICGVVNAHMNLYCQQTKNNYNLFKMRKLHKQILAYTSTSFEVPKMFEDDMSVYNAVNAFIDETEKGNIIGKLKDIVNKYDELDEKRIYISKDFYETLSCFMSGNWNLITGCVENFYDENIHAKGKSKEEKVKKAVKEDKYKSINDVNDLVEKYIDEKERNEFKNSNAKQYIREISNIITDTETAHLEYDEHISLIESEEKADEIKKRLDMYMNMYHWVKAFIVDEVLDRDEMFYSDIDDIYNILENIVPLYNRVRNYVTQKPYTSKKIKLNFQSPTLANGWSQSKEFDNNAIILIRDNKYYLAIFNAKNKPDKKIIQGNSDKKNDNDYKKMVYNLLPGANKMLPKVFLSKKGIETFKPSDYIISGYNAHKHIKTSENFDISFCRDLIDYFKNSIEKHAEWRKYEFKFSATDSYNDISEFYREVEMQGYRIDWTYISEADINKLDEEGKIYLFQIYNKDFAENSTGKENLHTMYFKNIFSEENLKNIVIKLNGQAELFYRKASVKNPVKHKKDSVLVNKTYKNQLDNGDVVRIPIPDDIYNEIYKMYNGYIKESDLSEAAKEYLDKVEVRTAQKDIVKDYRYTVDKYFIHTPITINYKVTARNNVNDMAVKYIAQNDDIHVIGIDRGERNLIYISVIDSHGNIVKQKSYNILNNYDYKKKLVEKEKTREYARKNWKSIGNIKELKEGYISGVVHEIAMLMVEYNAIIAMEDLNYGFKRGRFKVERQVYQKFESMLINKLNYFASKGKSVDEPGGLLKGYQLTYVPDNIKNLGKQCGVIFYVPAAFTSKIDPSTGFISAFNFKSISTNASRKQFFMQFDEIRYCAEKDMFSFGFDYNNFDTYNITMGKTQWTVYTNGERLQSEFNNARRTGKTKSINLTETIKLLLEDNEINYADGHDVRIDMEKMYEDKNSEFFAQLLSLYKLTVQMRNSYTEAEEQEKGISYDKIISPVINDEGEFFDSDNYKESDDKECKMPKDADANGAYCIALKGLYEVLKIKSEWTEDGFDRNCLKLPHAEWLDFIQNKRYE

SEQ ID NO: 42 - protein, 1263 aa, Eubacterium rectale
  MISC_FEATURE (1)..(1263): Genbank CUM80100 Cpf1
MNNGTNNFQNFIGISSLQKTLRNALIPTETTQQFIVKNGIIKEDELRGENRQILKDIMDDYYRGFISETLSSIDDIDWTSLFEKMEIQLKNGDNKDTLIKEQAEKRKAIYKKFADDDRFKNMFSAKLISDILPEFVIHNNNYSASEKEEKTQVIKLFSRFATSFKDYFKNRANCFSADDISSSSCHRIVNDNAEIFFSNALVYRRIVKNLSNDDINKISGDMKDSLKEMSLDEIYSYEKYGEFITQEGISFYNDICGKVNSFMNLYCQKNKENKNLYKLRKLHKQILCIADTSYEVPYKFESDEEVYQSVNGFLDNISSKHIVERLRKIGDNYNGYNLDKIYIVSRFYESVSQKTYRDWETINTALEIHYNNILPGNGKSKADKVKKAVKNDLQKSITEINELVSNYKLCPDDNIKAETYIHEISHILNNFEAQELKYNPEIHLVESELKASELKNVLDVIMNAFHWCSVFMTEELVDKDNNFYAELEEIYDEIYPVISLYNLVRNYVTQKPYSTKKIKLNFGIPTLADGWSKSKEYSNNAIILMRDNLYYLGIFNAKNKPDKKIIEGNTSENKGDYKKMIYNLLPGPNKMIPKVFLSSKTGVETYKPSAYILEGYKQNKHLKSSKDFDITFCRDLIDYFKNCIAIHPEWKNFGFDFSDTSTYEDISGFYREVELQGYKIDWTYISEKDIDLLQEKGQLYLFQIYNKDFSKKSTGNDNLHTMYLKNLFSEENLKDIVLKLNGEAEIFFRKSSIKNPIIHKKGSILVNRTYEAEEKDQFGNIQIVRKTIPENIYQELYKYFNDKSDKELSDEAAKLKNVVGHHEAATNIVKDYRYTYDKYFLHMPITINFKANKTSFINDRILQYIAKENDLHVIGIDRGERNLIYVSVIDTCGNIVEQKSFNIVNGYDYQIKLKQQEGARQIARKEWKEIGKIKEIKEGYLSLVIHEISKMVIKYNAIIAMEDLSYGFKKGRFKVERQVYQKFETMLINKLNYLVFKDISITENGGLLKGYQLTYIPEKLKNVGHQCGCIFYVPAAYTSKIDPTTGFANIFKFKDLTVDAKREFIKKFDSIRYDSEKNLFCFTFDYNNFITQNTVMSKSSWSVYTYGVRIKRRFVNGRFSNESDTIDITKDMEKTLEMTDINWRDGHDLRQDIIDYEIVQHIFEIFKLTVQMRNSLSELEDRDYDRLISPVLNENNIFYDSAKAGDALPKDADANGAYCIALKGLYEIKQITENWKEDGKFSRDKLKISNKDWFDFIQNKRYL

SEQ ID NO: 43 - protein, 966 aa, Uncultured Bacterium
  MISC_FEATURE (1)..(966): Genbank EKE06926 Cpf1
MENYDKCLTQLGIEKFNLEIVGEINKELNLFSQQNRDILPKAPKLKFLYKQIGCGKRIFDLFSIIVGNEWKELKNLQNNKDDGKSFSQKELLEKIRKLYKLFFDKPSDYELDKIYFNKQSINTISSMWFVNWHKLSELLSGKRIIKNKNKETGEYTIPKKISLADLKNILESETNVEDLFKKGKINEDEIKENNSVGVYEKLFSSNGWETFLAIWEYEINESFKVLDNNVAKFELKKQTKFQNLDKKERVFFIKEFCDAFLAIERMVKYHKVDENNDTDDNFYETIDLYLQETELRKYYDAFRNYLTEKPFSENKIKLNFKSGTLLGGWSQTFETYGSLIFEKNGEYFLGIINGTKFSESELNKIYNINSDSIKAKRLLYNTQKIDNKNPPRWFIRSKKTTFSPMVREGLLDPESILELYDKKLYSKTENKNGYKEYLPRLLDYFKDGFLKHKDFVQFKENFKWLDNSEYDTVVDFYNHTADMCYKTSWEDINFTELENLTKDSRIYLFKIYNKDFAEKTSGIKNSHTILFLELLKSENNLKLKLLGGGEVFYREKSIEKEIDKERSFKTDKFEIIKNKRYSEEKYFLHFPIEIKGRKLKGSFNQFLNKEISKKESVNILGIDRGEKHLLYYSLVNNNGEIIKQGSFNKIKCGNKIVDYNELLSKRAKEMMEARQSWETIGKIKDLKEGYLSQVIHEIYKLVIENNAIVVLEDLNTEFKAKRTAKVEKSVYKKFELALVKKLNHLILKEKKANELGGSLNAYQLTPYIKPGDVDKFEKAKQWGIMFYVRPDYTSQTDPVTGWRKTIYISNSETIENIKKKWKDANIKIYFDSDKKCFKFLYDKWELCAYPNLERLYWNRSEKNAEGKFGNMKKYSLHKEFECIFEGVNKSKNISDQMFDKEDFNWKSFIFYWNLLNQIRNSDKSKDENESDFIQSPIWSEKINDFFDSRKKYQIDLPENGDANGAY

SEQ ID NO: 44 - protein, 1247 aa, Uncultured Bacterium
  MISC_FEATURE (1)..(1247): Genbank EKE28449 Cpf1
MFKGDAFTGLYEVQKTLRFELVPIGLTQSYLENDWVIQKDKEVEENYGKIKAYFDLIHKEFVRQSLENAWLCQLDDFYEKYIELHNSLETRKDKNLAKQFEKVMKSLKKEFVSFFDAKWNEWKQKFSFLKKWWIDVLNEKEVLDLMAEFYPDEKELFDKFDKFFTYFSNFKESRKNFYADDGRAWAIATRAIDENLITFIKNIEDFKKLNSSFREFVNDNFSEEDKQIFEIDFYNNCLLQPWIDKYNKIVWWYSLENWEKVQWLNEKINNFKQNQNKSNSKDLKFPRMKLLYKQILGDKEKKVYIDEIRDDKNLIDLIDNSKRRNQIKIDNANDIINDFINNNAKFELDKIYLTRQSINTISSKYFSSWDYIRWYFWTGELQEFVSFYDLKETFWKIEYETLENIFKDCYVKGINTESQNNIVFETQGIYENFLNIFKFEFNQNISQISLLEWELDKIQNEDIKKNEKQVEVIKNYFDSVMSVYKMTKYFSLEKWKKRVELDTDNNFYNDFNEYLEGFEIWKDYNLVRNYITKKQVNTDKIKLNFDNSQFLTWWDKDKENERLGIILRREWKYYLWILKKWNTLNFGDYLQKEWEIFYEKMNYKQLNNVYRQLPRLLFPLTKKLNELKWDELKKYLSKYIQNFWYNEEIAQIKIEFDIFQESKEKWEKFDIDKLRKLIEYYKKWVLALYSDLYDLEFIKYKNYDDLSIFYSDVEKKMYNLNFTKIDKSLIDGKVKSWELYLFQIYNKDFSESKKEWSTENIHTKYFKLLFNEKNLQNLVVKLSWWADIFFRDKTENLKFKKDKNGQEILDHRRFSQDKIMFHISITLNANCWDKYWFNQYVNEYMNKERDIKIIWIDRWEKHLAYYCVIDKSWKIFNNEIWTLNELNWVNYLEKLEKIESSRKDSRISWWEIENIKELKNGYISQVINKLTELIVKYNAIIVFEDLNIWFKRWRQKIEKQIYQKLELALAKKLNYLTQKDKKDDEILWNLKALQLVPKVNDYQDIWNYKQSWIMFYVRANYTSVTCPNCWLRKNLYISNSATKENQKKSLNSIAIKYNDWKFSFSYEIDDKSWKQKQSLNKKKFIVYSDIERFVYSPLEKLTKVIDVNKKLLELFRDFNLSLDINKQIQEKDLDSVFFKSLTHLFNLILQLRNSDSKDNKDYISCPSCYYHSNNWLQWFEFNWDANWAYNIARKGIILLDRIRKNQEKPDLYVSDIDWDNFVQSNQFPNTIIPIQNIEKQVPLNIKI

SEQ ID NO: 45 - protein, 1250 aa, Smithella sp.
  MISC_FEATURE (1)..(1250): Genbank KFO67989 Cpf1
MQTLFENFTNQYPVSKTLRFELIPQGKTKDFIEQKGLLKKDEDRAEKYKKVKNIIDEYHKDFIEKSLNGLKLDGLEEYKTLYLKQEKDDKDKKAFDKEKENLRKQIANAFRNNEKFKTLFAKELIKNDLMSFACEEDKKNVKEFEAFTTYFTGFHQNRANMYVADEKRTAIASRLIHENLPKFIDNIKIFEKMKKEAPELLSPFNQTLKDMKDVIKGTTLEEIFSLDYFNKTLTQSGIDIYNSVIGGRTPEEGKTKIKGLNEYINTDFNQKQTDKKKRQPKFKQLYKQILSDRQSLSFIAEAFKNDTEILEAIEKFYVNELLHFSNEGKSTNVLDAIKNAVSNLESFNLTKIYFRSGTSLTDVSRKVFGEWSIINRALDNYYATTYPIKPREKSEKYEERKEKWLKQDFNVSLIQTAIDEYDNETVKGKNSGKVIVDYFAKFCDDKETDLIQKVNEGYIAVKDLLNTPYPENEKLGSNKDQVKQIKAFMDSIMDIMHFVRPLSLKDTDKEKDETFYSLFTPLYDHLTQTIALYNKVRNYLTQKPYSTEKIKLNFENSTLLGGWDLNKETDNTAIILRKENLYYLGIMDKRHNRIFRNVPKADKKDSCYEKMVYKLLPGANKMLPKVFFSQSRIQEFTPSAKLLENYENETHKKGDNFNLNHCHQLIDFFKDSINKHEDWKNFDFRFSATSTYADLSGFYHEVEHQGYKISFQSIADSFIDDLVNEGKLYLFQIYNKDFSPFSKGKPNLHTLYWKMLFDENNLKDVVYKLNGEAEVFYRKKSIAEKNTTIHKANESIINKNPDNPKATSTFNYDIVKDKRYTIDKFQFHVPITMNFKAEGIFNMNQRVNQFLKANPDINIIGIDRGERHLLYYTLINQKGKILKQDTLNVIANEKQKVDYHNLLDKKEGDRATARQEWGVIETIKELKEGYLSQVIHKLTDLMIENNAIIVMEDLNFGFKRGRQKVEKQVYQKFEKMLIDKLNYLVDKNKKANELGGLLNAFQLANKFESFQKMGKQNGFIFYVPAWNTSKTDPATGFIDFLKPRYENLKQAKDFFEKFDSIRLNSKADYFEFAFDFKNFTGKADGGRTKWTVCTTNEDRYAWNRALNNNRGSQEKYDITAELKSLFDGKVDYKSGKDLKQQIASQELADFFRTLMKYLSVTLSLRHNNGEKGETEQDYILSPVADSMGKFFDSRKAGDDMPKNADANGAYHIALKGLWCLEQISKTDDLKKVKLAISNKEWLEFMQTLKG

SEQ ID NO: 46 - protein, 1477 aa, Candidatus Peregrinibacteria
  MISC_FEATURE (1)..(1477): Genbank KKP36646 Cpf1
MSNFFKNFTNLYELSKTLRFELKPVGDTLTNMKDHLEYDEKLQTFLKDQNIDDAYQALKPQFDEIHEEFITDSLESKKAKEIDFSEYLDLFQEKKELNDSEKKLRNKIGETFNKAGEKWKKEKYPQYEWKKGSKIANGADILSCQDMLQFIKYKNPEDEKIKNYIDDTLKGFFTYFGGFNQNRANYYETKKEASTAVATRIVHENLPKFCDNVIQFKHIIKRKKDGTVEKTERKTEYLNAYQYLKNNNKITQIKDAETEKMIESTPIAEKIFDVYYFSSCLSQKQIEEYNRIIGHYNLLINLYNQAKRSEGKHLSANEKKYKDLPKFKTLYKQIGCGKKKDLFYTIKCDTEEEANKSRNEGKESHSVEEIINKAQEAINKYFKSNNDCENINTVPDFINYILTKENYEGVYWSKAAMNTISDKYFANYHDLQDRLKEAKVFQKADKKSEDDIKIPEAIELSGLFGVLDSLADWQTTLFKSSILSNEDKLKIITDSQTPSEALLKMIFNDIEKNMESFLKETNDIITLKKYKGNKEGTEKIKQWFDYTLAINRMLKYFLVKENKIKGNSLDTNISEALKTLIYSDDAEWFKWYDALRNYLTQKPQDEAKENKLKLNFDNPSLAGGWDVNKECSNFCVILKDKNEKKYLAIMKKGENTLFQKEWTEGRGKNLTKKSNPLFEINNCEILSKMEYDFWADVSKMIPKCSTQLKAVVNHFKQSDNEFIFPIGYKVTSGEKFREECKISKQDFELNNKVFNKNELSVTAMRYDLSSTQEKQYIKAFQKEYWELLFKQEKRDTKLTNNEIFNEWINFCNKKYSELLSWERKYKDALTNWINFCKYFLSKYPKTTLFNYSFKESENYNSLDEFYRDVDICSYKLNINTTINKSILDRLVEEGKLYLFEIKNQDSNDGKSIGHKNNLHTIYWNAIFENFDNRPKLNGEAEIFYRKAISKDKLGIVKGKKTKNGTEIIKNYRFSKEKFILHVPITLNFCSNNEYVNDIVNTKFYNFSNLHFLGIDRGEKHLAYYSLVNKNGEIVDQGTLNLPFTDKDGNQRSIKKEKYFYNKQEDKWEAKEVDCWNYNDLLDAMASNRDMARKNWQRIGTIKEAKNGYVSLVIRKIADLAVNNERPAFIVLEDLNTGFKRSRQKIDKSVYQKFELALAKKLNFLVDKNAKRDEIGSPTKALQLTPPVNNYGDIENKKQAGIMLYTRANYTSQTDPATGWRKTIYLKAGPEETTYKKDGKIKNKSVKDQIIETFTDIGFDGKDYYFEYDKGEFVDEKTGEIKPKKWRLYSGENGKSLDRFRGEREKDKYEWKIDKIDIVKILDDLFVNFDKNISLLKQLKEGVELTRNNEHGTGESLRFAINLIQQIRNTGNNERDNDFILSPVRDENGKHFDSREYWDKETKGEKISMPSSGDANGAFNIARKGIIMNAHILANSDSKDLSLFVSDEEWDLHLNNKTEWKKQLNIFSSRKAMAKRKK

SEQ ID NO: 47 - protein, 1285 aa, Candidatus Roizmanbacteria bacterium
  MISC_FEATURE (1)..(1285): Genbank KKQ38174 Cpf1
MKSFDSFTNLYSLSKTLKFEMRPVGNTQKMLDNAGVFEKDKLIQKKYGKTKPYFDRLHREFIEEALTGVELIGLDENFRTLVDWQKDKKNNVAMKAYENSLQRLRTEIGKIFNLKAEDWVKNKYPILGLKNKNTDILFEEAVFGILKARYGEEKDTFIEVEEIDKTGKSKINQISIFDSWKGFTGYFKKFFETRKNFYKNDGTSTAIATRIIDQNLKRFIDNLSIVESVRQKVDLAETEKSFSISLSQFFSIDFYNKCLLQDGIDYYNKIIGGETLKNGEKLIGLNELINQYRQNNKDQKIPFFKLLDKQILSEKILFLDEIKNDTELIEALSQFAKTAEEKTKIVKKLFADFVENNSKYDLAQIYISQEAFNTISNKWTSETETFAKYLFEAMKSGKLAKYEKKDNSYKFPDFIALSQMKSALLSISLEGHFWKEKYYKISKFQEKTNWEQFLAIFLYEFNSLFSDKINTKDGETKQVGYYLFAKDLHNLILSEQIDIPKDSKVTIKDFADSVLTIYQMAKYFAVEKKRAWLAEYELDSFYTQPDTGYLQFYDNAYEDIVQVYNKLRNYLTKKPYSEEKWKLNFENSTLANGWDKNKESDNSAVILQKGGKYYLGLITKGHNKIFDDRFQEKFIVGIEGGKYEKIVYKFFPDQAKMFPKVCFSAKGLEFFRPSEEILRIYNNAEFKKGETYSIDSMQKLIDFYKDCLTKYEGWACYTFRHLKPTEEYQNNIGEFFRDVAEDGYRIDFQGISDQYIHEKNEKGELHLFEIHNKDWNLDKARDGKSKTTQKNLHTLYFESLFSNDNVVQNFPIKLNGQAEIFYRPKTEKDKLESKKDKKGNKVIDHKRYSENKIFFHVPLTLNRTKNDSYRFNAQINNFLANNKDINIIGVDRGEKHLVYYSVITQASDILESGSLNELNGVNYAEKLGKKAENREQARRDWQDVQGIKDLKKGYISQVVRKLADLAIKHNAIIILEDLNMRFKQVRGGIEKSIYQQLEKALIDKLSFLVDKGEKNPEQAGHLLKAYQLSAPFETFQKMGKQTGIIFYTQASYTSKSDPVTGWRPHLYLKYFSAKKAKDDIAKFTKIEFVNDRFELTYDIKDFQQAKEYPNKTVWKVCSNVERFRWDKNLNQNKGGYTHYTNITENIQELFTKYGIDITKDLLTQISTIDEKQNTSFFRDFIFYFNLICQIRNTDDSEIAKKNGKDDFILSPVEPFFDSRKDNGNKLPENGDDNGAYNIARKGIVILNKISQYSEKNENCEKMKWGDLYVSNIDWDNFVTQANARH

SEQ ID NO: 48 - protein, 1403 aa, Candidatus Falkowbacteria bacterium
  MISC_FEATURE (1)..(1403): Genbank KKR91555 Cpf1
MLFFMSTDITNKPREKGVFDNFTNLYEFSKTLTFGLIPLKWDDNKKMIVEDEDFSVLRKYGVIEEDKRIAESIKIAKFYLNILHRELIGKVLGSLKFEKKNLENYDRLLGEIEKNNKNENISEDKKKEIRKNFKKELSIAQDILLKKVGEVFESNGSGILSSKNCLDELTKRFTRQEVDKLRRENKDIGVEYPDVAYREKDGKEETKSFFAMDVGYLDDFHKNRKQLYSVKGKKNSLGRRILDNFEIFCKNKKLYEKYKNLDIDFSEIERNFNLTLEKVFDFDNYNERLTQEGLDEYAKILGGESNKQERTANIHGLNQIINLYIQKKQSEQKAEQKETGKKKIKFNKKDYPTFTCLQKQILSQVFRKEIIIESDRDLIRELKFFVEESKEKVDKARGIIEFLLNHEENDIDLAMVYLPKSKINSFVYKVFKEPQDFLSVFQDGASNLDFVSFDKIKTHLENNKLTYKIFFKTLIKENHDFESFLILLQQEIDLLIDGGETVTLGGKKESITSLDEKKNRLKEKLGWFEGKVRENEKMKDEEEGEFCSTVLAYSQAVLNITKRAEIFWLNEKQDAKVGEDNKDMIFYKKFDEFADDGFAPFFYFDKFGNYLKRRSRNTTKEIKLHFGNDDLLEGWDMNKEPEYWSFILRDRNQYYLGIGKKDGEIFHKKLGNSVEAVKEAYELENEADFYEKIDYKQLNIDRFEGIAFPKKTKTEEAFRQVCKKRADEFLGGDTYEFKILLAIKKEYDDFKARRQKEKDWDSKFSKEKMSKLIEYYITCLGKRDDWKRFNLNFRQPKEYEDRSDFVRHIQRQAYWIDPRKVSKDYVDKKVAEGEMFLFKVHNKDFYDFERKSEDKKNHTANLFTQYLLELFSCENIKNIKSKDLIESIFELDGKAEIRFRPKTDDVKLKIYQKKGKDVTYADKRDGNKEKEVIQHRRFAKDALTLHLKIRLNFGKHVNLFDFNKLVNTELFAKVPVKILGMDRGENNLIYYCFLDEHGEIENGKCGSLNRVGEQIITLEDDKKVKEPVDYFQLLVDREGQRDWEQKNWQKMTRIKDLKKAYLGNVVSWISKEMLSGIKEGVVTIGVLEDLNSNFKRTRFFRERQVYQGFEKALVNKLGYLVDKKYDNYRNVYQFAPIVDSVEEMEKNKQIGTLVYVPASYTSKICPHPKCGWRERLYMKNSASKEKIVGLLKSDGIKISYDQKNDRFYFEYQWEQEHKSDGKKKKYSGVDKVFSNVSRMRWDVEQKKSIDFVDGTDGSITNKLKSLLKGKGIELDNINQQIVNQQKELGVEFFQSIIFYFNLIMQIRNYDKEKSGSEADYIQCPSCLFDSRKPEMNGKLSAITNGDANGAYNIARKGFMQLCRIRENPQEPMKLITNREWDEAVREWDIYSAAQKIPVLSEEN

SEQ ID NO: 49 - protein, 1352 aa, Parcubacteria group bacterium
  MISC_FEATURE (1)..(1352): Genbank KKT48220 Cpf1
MENIFDQFIGKYSLSKTLRFELKPVGKTEDFLKINKVFEKDQTIDDSYNQAKFYFDSLHQKFIDAALASDKTSELSFQNFADVLEKQNKIILDKKREMGALRKRDKNAVGIDRLQKEINDAEDIIQKEKEKIYKDVRTLFDNEAESWKTYYQEREVDGKKITFSKADLKQKGADFLTAAGILKVLKYEFPEEKEKEFQAKNQPSLFVEEKENPGQKRYIFDSFDKFAGYLTKFQQTKKNLYAADGTSTAVATRIADNFIIFHQNTKVFRDKYKNNHTDLGFDEENIFEIERYKNCLLQREIEHIKNENSYNKIIGRINKKIKEYRDQKAKDTKLTKSDFPFFKNLDKQILGEVEKEKQLIEKTREKTEEDVLIERFKEFIENNEERFTAAKKLMNAFCNGEFESEYEGIYLKNKAINTISRRWFVSDRDFELKLPQQKSKNKSEKNEPKVKKFISIAEIKNAVEELDGDIFKAVFYDKKIIAQGGSKLEQFLVIWKYEFEYLFRDIERENGEKLLGYDSCLKIAKQLGIFPQEKEAREKATAVIKNYADAGLGIFQMMKYFSLDDKDRKNTPGQLSTNFYAEYDGYYKDFEFIKYYNEFRNFITKKPFDEDKIKLNFENGALLKGWDENKEYDFMGVILKKEGRLYLGIMHKNHRKLFQSMGNAKGDNANRYQKMIYKQIADASKDVPRLLLTSKKAMEKFKPSQEILRIKKEKTFKRESKNFSLRDLHALIEYYRNCIPQYSNWSFYDFQFQDTGKYQNIKEFTDDVQKYGYKISFRDIDDEYINQALNEGKMYLFEVVNKDIYNTKNGSKNLHTLYFEHILSAENLNDPVFKLSGMAEIFQRQPSVNEREKITTQKNQCILDKGDRAYKYRRYTEKKIMFHMSLVLNTGKGEIKQVQFNKIINQRISSSDNEMRVNVIGIDRGEKNLLYYSVVKQNGEIIEQASLNEINGVNYRDKLIEREKERLKNRQSWKPVVKIKDLKKGYISHVIHKICQLIEKYSAIVVLEDLNMRFKQIRGGIERSVYQQFEKALIDKLGYLVFKDNRDLRAPGGVLNGYQLSAPFVSFEKMRKQTGILFYTQAEYTSKTDPITGFRKNVYISNSASLDKIKEAVKKFDAIGWDGKEQSYFFKYNPYNLADEKYKNSTVSKEWAIFASAPRIRRQKGEDGYWKYDRVKVNEEFEKLLKVWNFVNPKATDIKQEIIKKEKAGDLQGEKELDGRLRNFWHSFIYLFNLVLELRNSFSLQIKIKAGEVIAVDEGVDFIASPVKPFFTTPNPYIPSNLCWLAVENADANGAYNIARKGVMILKKIREHAKKDPEFKKLPNLFISNAEWDEAARDWGKYAGTTALNLDH

SEQ ID NO: 50 - protein, 1298 aa, Thiomicrospira sp.
  MISC_FEATURE (1)..(1298): Genbank KUJ74576 Cpf1
MTKTFDSEFFNLYSLQKTVRFELKPVGETASFVEDFKNEGLKRVVSEDERRAVDYQKVKEIIDDYHRDFIEESLNYFPEQVSKDALEQAFHLYQKLKAAKVEEREKALKEWEALQKKLREKVVKCFSDSNKARFSRIDKKELIKEDLINWLVAQNREDDIPTVETFNNFTTYFTGFHENRKNIYSKDDHATAISFRLIHENLPKFFDNVISFNKLKEGFPELKFDKVKEDLEVDYDLKHAFEIEYFVNFVTQAGIDQYNYLLGGKTLEDGTKKQGMNEQINLFKQQQTRDKARQIPKLIPLFKQILSERTESQSFIPKQFESDQELFDSLQKLHNNCQDKFTVLQQAILGLAEADLKKVFIKTSDLNALSNTIFGNYSVFSDALNLYKESLKTKKAQEAFEKLPAHSIHDLIQYLEQFNSSLDAEKQQSTDTVLNYFIKTDELYSRFIKSTSEAFTQVQPLFELEALSSKRRPPESEDEGAKGQEGFEQIKRIKAYLDTLMEAVHFAKPLYLVKGRKMIEGLDKDQSFYEAFEMAYQELESLIIPIYNKARSYLSRKPFKADKFKINFDNNTLLSGWDANKETANASILFKKDGLYYLGIMPKGKTFLFDYFVSSEDSEKLKQRRQKTAEEALAQDGESYFEKIRYKLLPGASKMLPKVFFSNKNIGFYNPSDDILRIRNTASHTKNGTPQKGHSKVEFNLNDCHKMIDFFKSSIQKHPEWGSFGFTFSDTSDFEDMSAFYREVENQGYVISFDKIKETYIQSQVEQGNLYLFQIYNKDFSPYSKGKPNLHTLYWKALFEEANLNNVVAKLNGEAEIFFRRHSIKASDKVVHPANQAIDNKNPHTEKTQSTFEYDLVKDKRYTQDKFFFHVPISLNFKAQGVSKFNDKVNGFLKGNPDVNIIGIDRGERHLLYFTVVNQKGEILVQESLNTLMSDKGHVNDYQQKLDKKEQERDAARKSWTTVENIKELKEGYLSHVVHKLAHLIIKYNAIVCLEDLNFGFKRGRFKVEKQVYQKFEKALIDKLNYLVFKEKELGEVGHYLTAYQLTAPFESFKKLGKQSGILFYVPADYTSKIDPTTGFVNFLDLRYQSVEKAKQLLSDFNAIRFNSVQNYFEFEIDYKKLTPKRKVGTQSKWVICTYGDVRYQNRRNQKGHWETEEVNVTEKLKALFASDSKTTTVIDYANDDNLIDVILEQDKASFFKELLWLLKLTMTLRHSKIKSEDDFILSPVKNEQGEFYDSRKAGEVWPKDADANGAYHIALKGLWNLQQINQWEKGKTLNLAIKNQDWFSFIQEKPYQE

SEQ ID NO: 51 - protein, 1242 aa, Bacteroidales bacterium
  MISC_FEATURE (1)..(1242): Genbank KXB38146 Cpf1
MKKFTNLYPVQKTLRFELIPQGNTSKHLCKIIQEDEQIAEDSQEVKKLLDRYHKEFIAIALSSFPTSPLAKEIIPKLKEFAQIRATGDAKQISTIQDELRELVVKGFKGEGEQERRYKILIGAKGNPNADELFNTELINFLKDPAEQALVKKFQKHTGYFLGFNENRKNMYSAKAQSTAIAYRLIHENLPRFLDNITTYEKVKTYLKEEIPQLEKELVRAGASLVSHVDSVFTIDFFLEVFTQSGIDQYNALIGKIVNQEQGEVKGLNERINLYNQQHKQEAKLPLFKPLYKQILSDREQLSWLAEAYNSDKDLLDSIQKYYQLLIDNQIFERIPRLMHTLEKAPLDKIWITYDTQLTSISNTLYGSWRVIGEALGRNAKSEKERKSSQKKALNYSLESINQAIAKMPSDEELPPIQKYFIALGSNPSKKDASSGTLVDKVRSSYKACQDILTNPDHTGKKLIQDKKQVDLLKQLLDDLLILQRFIKPLLYSNNENETHKDEVFYTELTDIMDLLNPIVGLYNKVRNYLTQKPYSTEKFKINFKSSSLLAGWDRNKEKDNLGVILKREDKYYLAIMDKAHNATFKNKSLPTQGECYEKMEYKLLPGANKMLPKVYITSKKGIESFHPSEELQKKYKLGTHKKGASFNLSDMRALIDYFKESLEKHEEHSQFGFHFSDTSTYEDISGFYREVEQQAYKITFRKVSVEYIDQLVNEGKLYLFQIYNKDFSPYSKGTPNLHTLYWKMLFDPANLQDIVYKLNGEAEVFFRKKSLQYDRPTHPKGQPINKKSLLNEGETSLFDYDLIKDRRFTVDKFQFHVPITMNFKATQGTKVNQMVQEEVKKSKGFHLIGIDRGERNLLYIVVINERGEIIEQCSLNKIVNTYQEKEHTVDYKALLEKRSQSRLEERKSWQTIENIKELKGGYLSQVVHKIAQLMIKYNAIAVLEDLNFGFIRTRKKFEFSVYQEFEKKLIDKLGYVVDKKAPIQQEGGLLQAYQLTAPFKSFREMGKQNGFLFYVPAWNTSAIDPRTGFVNLLDTRYESIAKTKELIKKLKDIRYNSQKDWFEIDLDYNAFGNRAKGSRSKWRLCSYGERIEHTRKQDSNGQEESDSMVVLTEAFKDVFTKYQIDYRENLKEQLLLQSDKAFFVDFLSLLRLTLQLRNSLSNSLIDYILSPVADENGEFFDSRKALSNEPQDADANGAYHIALKGLWVLDKIRKTEKVTPAKLALSNQEWLSFAQEKPFFNE

SEQ ID NO: 52 - protein, 1300 aa, Francisella tularensis; identical to SEQ ID NO: 7
  MISC_FEATURE (1)..(1300): Genbank WP_003040289 Cpf1

SEQ ID NO: 53 - protein, 1310 aa, Helcococcus kunzii
  MISC_FEATURE (1)..(1310): Genbank WP_005398606 Cpf1
MFEKLSNIVSISKTIRFKLIPVGKTLENIEKLGKLEKDFERSDFYPILKNISDDYYRQYIKEKLSDLNLDWQKLYDAHELLDSSKKESQKNLEMIQAQYRKVLFNILSGELDKSGEKNSKDLIKNNKALYGKLFKKQFILEVLPDFVNNNDSYSEEDLEGLNLYSKFTTRLKNFWETRKNVFTDKDIVTAIPFRAVNENFGFYYDNIKIFNKNIEYLENKIPNLENELKEADILDDNRSVKDYFTPNGFNYVITQDGIDVYQAIRGGFTKENGEKVQGINEILNLTQQQLRRKPETKNVKLGVLTKLRKQILEYSESTSFLIDQIEDDNDLVDRINKFNVSFFESTEVSPSLFEQIERLYNALKSIKKEEVYIDARNTQKFSQMLFGQWDVIRRGYTVKITEGSKEEKKKYKEYLELDETSKAKRYLNIREIEELVNLVEGFEEVDVFSVLLEKFKMNNIERSEFEAPIYGSPIKLEAIKEYLEKHLEEYHKWKLLLIGNDDLDTDETFYPLLNEVISDYYIIPLYNLTRNYLTRKHSDKDKIKVNFDFPTLADGWSESKISDNRSIILRKGGYYYLGILIDNKLLINKKNKSKKIYEILIYNQIPEFSKSIPNYPFTKKVKEHFKNNVSDFQLIDGYVSPLIITKEIYDIKKEKKYKKDFYKDNNTNKNYLYTIYKWIEFCKQFLYKYKGPNKESYKEMYDFSTLKDTSLYVNLNDFYADVNSCAYRVLFNKIDENTIDNAVEDGKLLLFQIYNKDFSPESKGKKNLHTLYWLSMFSEENLRTRKLKLNGQAEIFYRKKLEKKPIIHKEGSILLNKIDKEGNTIPENIYHECYRYLNKKIGREDLSDEAIALFNKDVLKYKEARFDIIKDRRYSESQFFFHVPITFNWDIKTNKNVNQIVQGMIKDGEIKHIIGIDRGERHLLYYSVIDLEGNIVEQGSLNTLEQNRFDNSTVKVDYQNKLRTREEDRDRARKNWTNINKIKELKDGYLSHVVHKLSRLIIKYEAIVIMENLNQGFKRGRFKVERQVYQKFELALMNKLSALSFKEKYDERKNLEPSGILNPIQACYPVDAYQELQGQNGIVFYLPAAYTSVIDPVTGFTNLFRLKSINSSKYEEFIKKFKNIYFDNEEEDFKFIFNYKDFAKANLVILNNIKSKDWKISTRGERISYNSKKKEYFYVQPTEFLINKLKELNIDYENIDIIPLIDNLEEKAKRKILKALFDTFKYSVQLRNYDFENDYIISPTADDNGNYYNSNEIDIDKTNLPNNGDANGAFNIARKGLLLKDRIVNSNESKVDLKIKNEDWINFIIS

SEQ ID NO: 54 - protein, 1257 aa, Prevotella bryantii
  MISC_FEATURE (1)..(1257): Genbank WP_006283774 Cpf1
MQINNLKIIYMKFTDFTGLYSLSKTLRFELKPIGKTLENIKKAGLLEQDQHRADSYKKVKKIIDEYHKAFIEKSLSNFELKYQSEDKLDSLEEYLMYYSMKRIEKTEKDKFAKIQDNLRKQIADHLKGDESYKTIFSKDLIRKNLPDFVKSDEERTLIKEFKDFTTYFKGFYENRENMYSAEDKSTAISHRIIHENLPKFVDNINAFSKIILIPELREKLNQIYQDFEEYLNVESIDEIFHLDYFSMVMTQKQIEVYNAIIGGKSTNDKKIQGLNEYINLYNQKHKDCKLPKLKLLFKQILSDRIAISWLPDNFKDDQEALDSIDTCYKNLLNDGNVLGEGNLKLLLENIDTYNLKGIFIRNDLQLTDISQKMYASWNVIQDAVILDLKKQVSRKKKESAEDYNDRLKKLYTSQESFSIQYLNDCLRAYGKTENIQDYFAKLGAVNNEHEQTINLFAQVRNAYTSVQAILTTPYPENANLAQDKETVALIKNLLDSLKRLQRFIKPLLGKGDESDKDERFYGDFTPLWETLNQITPLYNMVRNYMTRKPYSQEKIKLNFENSTLLGGWDLNKEHDNTAIILRKNGLYYLAIMKKSANKIFDKDKLDNSGDCYEKMVYKLLPGANKMLPKVFFSKSRIDEFKPSENIIENYKKGTHKKGANFNLADCHNLIDFFKSSISKHEDWSKFNFHFSDTSSYEDLSDFYREVEQQGYSISFCDVSVEYINKMVEKGDLYLFQIYNKDFSEFSKGTPNMHTLYWNSLFSKENLNNIIYKLNGQAEIFFRKKSLNYKRPTHPAHQAIKNKNKCNEKKESIFDYDLVKDKRYTVDKFQFHVPITMNFKSTGNTNINQQVIDYLRTEDDTHIIGIDRGERHLLYLVVIDSHGKIVEQFTLNEIVNEYGGNIYRTNYHDLLDTREQNREKARESWQTIENIKELKEGYISQVIHKITDLMQKYHAVVVLEDLNMGFMRGRQKVEKQVYQKFEEMLINKLNYLVNKKADQNSAGGLLHAYQLTSKFESFQKLGKQSGFLFYIPAWNTSKIDPVTGFVNLFDTRYESIDKAKAFFGKFDSIRYNADKDWFEFAFDYNNFTTKAEGTRTNWTICTYGSRIRTFRNQAKNSQWDNEEIDLTKAYKAFFAKHGINIYDNIKEAIAMETEKSFFEDLLHLLKLTLQMRNSITGTTTDYLISPVHDSKGNFYDSRICDNSLPANADANGAYNIARKGLMLIQQIKDSTSSNRFKFSPITNKDWLIFAQEKPYLND

SEQ ID NO: 55 - protein, 1262 aa, Bacteroidetes oral
  MISC_FEATURE (1)..(1262): Genbank WP_009217842 Cpf1
MRKFNEFVGLYPISKTLRFELKPIGKTLEHIQRNKLLEHDAVRADDYVKVKKIIDKYHKCLIDEALSGFTFDTEADGRSNNSLSEYYLYYNLKKRNEQEQKTFKTIQNNLRKQIVNKLTQSEKYKRIDKKELITTDLPDFLTNESEKELVEKFKNFTTYFTEFHKNRKNMYSKEEKSTAIAFRLINENLPKFVDNIAAFEKVVSSPLAEKINALYEDFKEYLNVEEISRVFRLDYYDELLTQKQIDLYNAIVGGRTEEDNKIQIKGLNQYINEYNQQQTDRSNRLPKLKPLYKQILSDRESVSWLPPKFDSDKNLLIKIKECYDALSEKEKVFDKLESILKSLSTYDLSKIYISNDSQLSYISQKMFGRWDIISKAIREDCAKRNPQKSRESLEKFAERIDKKLKTIDSISIGDVDECLAQLGETYVKRVEDYFVAMGESEIDDEQTDTTSFKKNIEGAYESVKELLNNADNITDNNLMQDKGNVEKIKTLLDAIKDLQRFIKPLLGKGDEADKDGVFYGEFTSLWTKLDQVTPLYNMVRNYLTSKPYSTKKIKLNFENSTLMDGWDLNKEPDNTTVIFCKDGLYYLGIMGKKYNRVFVDREDLPHDGECYDKMEYKLLPGANKMLPKVFFSETGIQRFLPSEELLGKYERGTHKKGAGFDLGDCRALIDFFKKSIERHDDWKKFDFKFSDTSTYQDISEFYREVEQQGYKMSFRKVSVDYIKSLVEEGKLYLFQIYNKDFSAHSKGTPNMHTLYWKMLFDEENLKDVVYKLNGEAEVFFRKSSITVQSPTHPANSPIKNKNKDNQKKESKFEYDLIKDRRYTVDKFLFHVPITMNFKSVGGSNINQLVKRHIRSATDLHIIGIDRGERHLLYLTVIDSRGNIKEQFSLNEIVNEYNGNTYRTDYHELLDTREGERTEARRNWQTIQNIRELKEGYLSQVIHKISELAIKYNAVIVLEDLNFGFMRSRQKVEKQVYQKFEKMLIDKLNYLVDKKKPVAETGGLLRAYQLTGEFESFKTLGKQSGILFYVPAWNTSKIDPVTGFVNLFDTHYENIEKAKVFFDKFKSIRYNSDKDWFEFVVDDYTRFSPKAEGTRRDWTICTQGKRIQICRNHQRNNEWEGQEIDLTKAFKEHFEAYGVDISKDLREQINTQNKKEFFEELLRLLRLTLQMRNSMPSSDIDYLISPVANDTGCFFDSRKQAELKENAVLPMNADANGAYNIARKGLLAIRKMKQEENDSAKISLAISNKEWLKFAQTKPYLED

SEQ ID NO: 56 - protein, 1318 aa, Flavobacterium branchiophilum
  MISC_FEATURE (1)..(1318): Genbank WP_014085038 Cpf1
MTNKFTNQYSLSKTLRFELIPQGKTLEFIQEKGLLSQDKQRAESYQEMKKTIDKFHKYFIDLALSNAKLTHLETYLELYNKSAETKKEQKFKDDLKKVQDNLRKEIVKSFSDGDAKSIFAILDKKELITVELEKWFENNEQKDIYFDEKFKTFTTYFTGFHQNRKNMYSVEPNSTAIAYRLIHENLPKFLENAKAFEKIKQVESLQVNFRELMGEFGDEGLIFVNELEEMFQINYYNDVLSQNGITIYNSIISGFTKNDIKYKGLNEYINNYNQTKDKKDRLPKLKQLYKQILSDRISLSFLPDAFTDGKQVLKAIFDFYKINLLSYTIEGQEESQNLLLLIRQTIENLSSFDTQKIYLKNDTHLTTISQQVFGDFSVFSTALNYWYETKVNPKFETEYSKANEKKREILDKAKAVFTKQDYFSIAFLQEVLSEYILTLDHTSDIVKKHSSNCIADYFKNHFVAKKENETDKTFDFIANITAKYQCIQGILENADQYEDELKQDQKLIDNLKFFLDAILELLHFIKPLHLKSESITEKDTAFYDVFENYYEALSLLTPLYNMVRNYVTQKPYSTEKIKLNFENAQLLNGWDANKEGDYLTTILKKDGNYFLAIMDKKHNKAFQKFPEGKENYEKMVYKLLPGVNKMLPKVFFSNKNIAYFNPSKELLENYKKETHKKGDTFNLEHCHTLIDFFKDSLNKHEDWKYFDFQFSETKSYQDLSGFYREVEHQGYKINFKNIDSEYIDGLVNEGKLFLFQIYSKDFSPFSKGKPNMHTLYWKALFEEQNLQNVIYKLNGQAEIFFRKASIKPKNIILHKKKIKIAKKHFIDKKTKTSEIVPVQTIKNLNMYYQGKISEKELTQDDLRYIDNFSIFNEKNKTIDIIKDKRFTVDKFQFHVPITMNFKATGGSYINQTVLEYLQNNPEVKIIGLDRGERHLVYLTLIDQQGNILKQESLNTITDSKISTPYHKLLDNKENERDLARKNWGTVENIKELKEGYISQVVHKIATLMLEENAIVVMEDLNFGFKRGRFKVEKQIYQKLEKMLIDKLNYLVLKDKQPQELGGLYNALQLTNKFESFQKMGKQSGFLFYVPAWNTSKIDPTTGFVNYFYTKYENVDKAKAFFEKFEAIRFNAEKKYFEFEVKKYSDFNPKAEGTQQAWTICTYGERIETKRQKDQNNKFVSTPINLTEKIEDFLGKNQIVYGDGNCIKSQIASKDDKAFFETLLYWFKMTLQMRNSETRTDIDYLISPVMNDNGTFYNSRDYEKLENPTLPKDADANGAYHIAKKGLMLLNKIDQADLTKKVDLSISNRDWLQFVQKNK

SEQ ID NO: 57 - protein, 1230 aa, Lachnospiraceae bacterium
  MISC_FEATURE (1)..(1230): Genbank WP_016301126 Cpf1
MHENNGKIADNFIGIYPVSKTLRFELKPVGKTQEYIEKHGILDEDLKRAGDYKSVKKIIDAYHKYFIDEALNGIQLDGLKNYYELYEKKRDNNEEKEFQKIQMSLRKQIVKRFSEHPQYKYLFKKELIKNVLPEFTKDNAEEQTLVKSFQEFTTYFEGFHQNRKNMYSDEEKSTAIAYRVVHQNLPKYIDNMRIFSMILNTDIRSDLTELFNNLKTKMDITIVEEYFAIDGFNKVVNQKGIDVYNTILGAFSTDDNTKIKGLNEYINLYNQKNKAKLPKLKPLFKQILSDRDKISFIPEQFDSDTEVLEAVDMFYNRLLQFVIENEGQITISKLLTNFSAYDLNKIYVKNDTTISAISNDLFDDWSYISKAVRENYDSENVDKNKRAAAYEEKKEKALSKIKMYSIEELNFFVKKYSCNECHIEGYFERRILEILDKMRYAYESCKILHDKGLINNISLCQDRQAISELKDFLDSIKEVQWLLKPLMIGQEQADKEEAFYTELLRIWEELEPITLLYNKVRNYVTKKPYTLEKVKLNFYKSTLLDGWDKNKEKDNLGIILLKDGQYYLGIMNRRNNKIADDAPLAKTDNVYRKMEYKLLTKVSANLPRIFLKDKYNPSEEMLEKYEKGTHLKGENFCIDDCRELIDFFKKGIKQYEDWGQFDFKFSDTESYDDISAFYKEVEHQGYKITFRDIDETYIDSLVNEGKLYLFQIYNKDFSPYSKGTKNLHTLYWEMLFSQQNLQNIVYKLNGNAEIFYRKASINQKDVVVHKADLPIKNKDPQNSKKESMFDYDIIKDKRFTCDKYQFHVPITMNFKALGENHFNRKVNRLIHDAENMHIIGIDRGERNLIYLCMIDMKGNIVKQISLNEIISYDKNKLEHKRNYHQLLKTREDENKSARQSWQTIHTIKELKEGYLSQVIHVITDLMVEYNAIVVLEDLNFGFKQGRQKFERQVYQKFEKMLIDKLNYLVDKSKGMDEDGGLLHAYQLTDEFKSFKQLGKQSGFLYYIPAWNTSKLDPTTGFVNLFYTKYESVEKSKEFINNFTSILYNQEREYFEFLFDYSAFTSKAEGSRLKWTVCSKGERVETYRNPKKNNEWDTQKIDLTFELKKLFNDYSISLLDGDLREQMGKIDKADFYKKFMKLFALIVQMRNSDEREDKLISPVLNKYGAFFETGKNERMPLDADANGAYNIARKGLWIIEKIKNTDVEQLDKVKLTISNKEWLQYAQEHIL

SEQ ID NO: 58 - protein, 1246 aa, Porphyromonas macacae
  MISC_FEATURE (1)..(1246): Genbank WP_018359861 Cpf1
MKTQHFFEDFTSLYSLSKTIRFELKPIGKTLENIKKNGLIRRDEQRLDDYEKLKKVIDEYHEDFIANILSSFSFSEEILQSYIQNLSESEARAKIEKTMRDTLAKAFSEDERYKSIFKKELVKKDIPVWCPAYKSLCKKFDNFTTSLVPFHENRKNLYTSNEITASIPYRIVHVNLPKFIQNIEALCELQKKMGADLYLEMMENLRNVWPSFVKTPDDLCNLKTYNHLMVQSSISEYNRFVGGYSTEDGTKHQGINEWINIYRQRNKEMRLPGLVFLHKQILAKVDSSSFISDTLENDDQVFCVLRQFRKLFWNTVSSKEDDAASLKDLFCGLSGYDPEAIYVSDAHLATISKNIFDRWNYISDAIRRKTEVLMPRKKESVERYAEKISKQIKKRQSYSLAELDDLLAHYSEESLPAGFSLLSYFTSLGGQKYLVSDGEVILYEEGSNIWDEVLIAFRDLQVILDKDFTEKKLGKDEEAVSVIKKALDSALRLRKFFDLLSGTGAEIRRDSSFYALYTDRMDKLKGLLKMYDKVRNYLTKKPYSIEKFKLHFDNPSLLSGWDKNKELNNLSVIFRQNGYYYLGIMTPKGKNLFKTLPKLGAEEMFYEKMEYKQIAEPMLMLPKVFFPKKTKPAFAPDQSVVDIYNKKTFKTGQKGFNKKDLYRLIDFYKEALTVHEWKLFNFSFSPTEQYRNIGEFFDEVREQAYKVSMVNVPASYIDEAVENGKLYLFQIYNKDFSPYSKGIPNLHTLYWKALFSEQNQSRVYKLCGGGELFYRKASLHMQDTTVHPKGISIHKKNLNKKGETSLFNYDLVKDKRFTEDKFFFHVPISINYKNKKITNVNQMVRDYIAQNDDLQIIGIDRGERNLLYISRIDTRGNLLEQFSLNVIESDKGDLRTDYQKILGDREQERLRRRQEWKSIESIKDLKDGYMSQVVHKICNMVVEHKAIVVLENLNLSFMKGRKKVEKSVYEKFERMLVDKLNYLVVDKKNLSNEPGGLYAAYQLTNPLFSFEELHRYPQSGILFFVDPWNTSLTDPSTGFVNLLGRINYTNVGDARKFFDRFNAIRYDGKGNILFDLDLSRFDVRVETQRKLWTLTTFGSRIAKSKKSGKWMVERIENLSLCFLELFEQFNIGYRVEKDLKKAILSQDRKEFYVRLIYLFNLMMQIRNSDGEEDYILSPALNEKNLQFDSRLIEAKDLPVDADANGAYNVARKGLMVVQRIKRGDHESIHRIGRAQWLRYVQEGIVE

SEQ ID NO: 59 - protein, 1259 aa, Synergistes jonesii
  MISC_FEATURE (1)..(1259): Genbank WP_037975888 Type V CV CRISPR-associated protein Cpf1
MANSLKDFTNIYQLSKTLRFELKPIGKTEEHINRKLIIMHDEKRGEDYKSVTKLIDDYHRKFIHETLDPAHFDWNPLAEALIQSGSKNNKALPAEQKEMREKIISMFTSQAVYKKLFKKELFSELLPEMIKSELVSDLEKQAQLDAVKSFDKFSTYFTGFHENRKNIYSKKDTSTSIAFRIVHQNFPKFLANVRAYTLIKERAPEVIDKAQKELSGILGGKTLDDIFSIESFNNVLTQDKIDYYNQIIGGVSGKAGDKKLRGVNEFSNLYRQQHPEVASLRIKMVPLYKQILSDRTTLSFVPEALKDDEQAINAVDGLRSELERNDIFNRIKRLFGKNNLYSLDKIWIKNSSISAFSNELFKNWSFIEDALKEFKENEFNGARSAGKKAEKWLKSKYFSFADIDAAVKSYSEQVSADISSAPSASYFAKFTNLIETAAENGRKFSYFAAESKAFRGDDGKTEIIKAYLDSLNDILHCLKPFETEDISDIDTEFYSAFAEIYDSVKDVIPVYNAVRNYTTQKPFSTEKFKLNFENPALAKGWDKNKEQNNTAIILMKDGKYYLGVIDKNNKLRADDLADDGSAYGYMKMNYKFIPTPHMELPKVFLPKRAPKRYNPSREILLIKENKTFIKDKNFNRTDCHKLIDFFKDSINKHKDWRTFGFDFSDTDSYEDISDFYMEVQDQGYKLTFTRLSAEKIDKWVEEGRLFLFQIYNKDFADGAQGSPNLHTLYWKAIFSEENLKDVVLKLNGEAELFFRRKSIDKPAVHAKGSMKVNRRDIDGNPIDEGTYVEICGYANGKRDMASLNAGARGLIESGLVRITEVKHELVKDKRYTIDKYFFHVPFTINFKAQGQGNINSDVNLFLRNNKDVNIIGIDRGERNLVYVSLIDRDGHIKLQKDFNIIGGMDYHAKLNQKEKERDTARKSWKTIGTIKELKEGYLSQVVHEIVRLAVDNNAVIVMEDLNIGFKRGRFKVEKQVYQKFEKMLIDKLNYLVFKDAGYDAPCGILKGLQLTEKFESFTKLGKQCGIIFYIPAGYTSKIDPTTGFVNLFNINDVSSKEKQKDFIGKLDSIRFDAKRDMFTFEFDYDKFRTYQTSYRKKWAVWTNGKRIVREKDKDGKFRMNDRLLTEDMKNILNKYALAYKAGEDILPDVISRDKSLASEIFYVFKNTLQMRNSKRDTGEDFIISPVLNAKGRFFDSRKTDAALPIDADANGAYHIALKGSLVLDAIDEKLKEDGRIDYKDMAVSNPKWFEFMQTRKFDF

SEQ ID NO: 60 - protein, 1263 aa, Leptospira inadai
  MISC_FEATURE (1)..(1263): Genbank WP_020988726 Cpf1
MEDYSGFVNIYSIQKTLRFELKPVGKTLEHIEKKGFLKKDKIRAEDYKAVKKIIDKYHRAYIEEVFDSVLHQKKKKDKTRFSTQFIKEIKEFSELYYKTEKNIPDKERLEALSEKLRKMLVGAFKGEFSEEVAEKYKNLFSKELIRNEIEKFCETDEERKQVSNFKSFTTYFTGFHSNRQNIYSDEKKSTAIGYRIIHQNLPKFLDNLKIIESIQRRFKDFPWSDLKKNLKKIDKNIKLTEYFSIDGFVNVLNQKGIDAYNTILGGKSEESGEKIQGLNEYINLYRQKNNIDRKNLPNVKILFKQILGDRETKSFIPEAFPDDQSVLNSITEFAKYLKLDKKKKSIIAELKKFLSSFNRYELDGIYLANDNSLASISTFLFDDWSFIKKSVSFKYDESVGDPKKKIKSPLKYEKEKEKWLKQKYYTISFLNDAIESYSKSQDEKRVKIRLEAYFAEFKSKDDAKKQFDLLERIEEAYAIVEPLLGAEYPRDRNLKADKKEVGKIKDFLDSIKSLQFFLKPLLSAEIFDEKDLGFYNQLEGYYEEIDSIGHLYNKVRNYLTGKIYSKEKFKLNFENSTLLKGWDENREVANLCVIFREDQKYYLGVMDKENNTILSDIPKVKPNELFYEKMVYKLIPTPHMQLPRIIFSSDNLSIYNPSKSILKIREAKSFKEGKNFKLKDCHKFIDFYKESISKNEDWSRFDFKFSKTSSYENISEFYREVERQGYNLDFKKVSKFYIDSLVEDGKLYLFQIYNKDFSIFSKGKPNLHTIYFRSLFSKENLKDVCLKLNGEAEMFFRKKSINYDEKKKREGHHPELFEKLKYPILKDKRYSEDKFQFHLPISLNFKSKERLNFNLKVNEFLKRNKDINIIGIDRGERNLLYLVMINQKGEILKQTLLDSMQSGKGRPEINYKEKLQEKEIERDKARKSWGTVENIKELKEGYLSIVIHQISKLMVENNAIVVLEDLNIGFKRGRQKVERQVYQKFEKMLIDKLNFLVFKENKPTEPGGVLKAYQLTDEFQSFEKLSKQTGFLFYVPSWNTSKIDPRTGFIDFLHPAYENIEKAKQWINKFDSIRFNSKMDWFEFTADTRKFSENLMLGKNRVWVICTTNVERYFTSKTANSSIQYNSIQITEKLKELFVDIPFSNGQDLKPEILRKNDAVFFKSLLFYIKTTLSLRQNNGKKGEEEKDFILSPVVDSKGRFFNSLEASDDEPKDADANGAYHIALKGLMNLLVLNETKEENLSRPKWKIKNKDWLEFVWERNR

SEQ ID NO: 61 - protein, 1260 aa, Porphyromonas crevioricanis
  MISC_FEATURE (1)..(1260): Genbank WP_023941260 Cpf1
MDSLKDFTNLYPVSKTLRFELKPVGKTLENIEKAGILKEDEHRAESYRRVKKIIDTYHKVFIDSSLENMAKMGIENEIKAMLQSFCELYKKDHRTEGEDKALDKIRAVLRGLIVGAFTGVCGRRENTVQNEKYESLFKEKLIKEILPDFVLSTEAESLPFSVEEATRSLKEFDSFTSYFAGFYENRKNIYSTKPQSTAIAYRLIHENLPKFIDNILVFQKIKEPIAKELEHIRADFSAGGYIKKDERLEDIFSLNYYIHVLSQAGIEKYNALIGKIVTEGDGEMKGLNEHINLYNQQRGREDRLPLFRPLYKQILSDREQLSYLPESFEKDEELLRALKEFYDHIAEDILGRTQQLMTSISEYDLSRIYVRNDSQLTDISKKMLGDWNAIYMARERAYDHEQAPKRITAKYERDRIKALKGEESISLANLNSCIAFLDNVRDCRVDTYLSTLGQKEGPHGLSNLVENVFASYHEAEQLLSFPYPEENNLIQDKDNVVLIKNLLDNISDLQRFLKPLWGMGDEPDKDERFYGEYNYIRGALDQVIPLYNKVRNYLTRKPYSTRKVKLNFGNSQLLSGWDRNKEKDNSCVILRKGQNFYLAIMNNRHKRSFENKVLPEYKEGEPYFEKMDYKFLPDPNKMLPKVFLSKKGIEIYKPSPKLLEQYGHGTHKKGDTFSMDDLHELIDFFKHSIEAHEDWKQFGFKFSDTATYENVSSFYREVEDQGYKLSFRKVSESYVYSLIDQGKLYLFQIYNKDFSPCSKGTPNLHTLYWRMLFDERNLADVIYKLDGKAEIFFREKSLKNDHPTHPAGKPIKKKSRQKKGEESLFEYDLVKDRRYTMDKFQFHVPITMNFKCSAGSKVNDMVNAHIREAKDMHVIGIDRGERNLLYICVIDSRGTILDQISLNTINDIDYHDLLESRDKDRQQERRNWQTIEGIKELKQGYLSQAVHRIAELMVAYKAVVALEDLNMGFKRGRQKVESSVYQQFEKQLIDKLNYLVDKKKRPEDIGGLLRAYQFTAPFKSFKEMGKQNGFLFYIPAWNTSNIDPTTGFVNLFHAQYENVDKAKSFFQKFDSISYNPKKDWFEFAFDYKNFTKKAEGSRSMWILCTHGSRIKNFRNSQKNGQWDSEEFALTEAFKSLFVRYEIDYTADLKTAIVDEKQKDFFVDLLKLFKLTVQMRNSWKEKDLDYLISPVAGADGRFFDTREGNKSLPKDADANGAYNIALKGLWALRQIRQTSEGGKLKLAISNKEWLQFVQERSYEKD

SEQ ID NO: 62 - protein, 1253 aa, Prevotella albensis
  MISC_FEATURE (1)..(1253): Genbank WP_024988992 Cpf1
MNIKNFTGLYPLSKTLRFELKPIGKTKENIEKNGILTKDEQRAKDYLIVKGFIDEYHKQFIKDRLWDFKLPLESEGEKNSLEEYQELYELTKRNDAQEADFTEIKDNLRSSITEQLTKSGSAYDRIFKKEFIREDLVNFLEDEKDKNIVKQFEDFTTYFTGFYENRKNMYSSEEKSTAIAYRLIHQNLPKFMDNMRSFAKIANSSVSEHFSDIYESWKEYLNVNSIEEIFQLDYFSETLTQPHIEVYNYIIGKKVLEDGTEIKGINEYVNLYNQQQKDKSKRLPFLVPLYKQILSDREKLSWIAEEFDSDKKMLSAITESYNHLHNVLMGNENESLRNLLLNIKDYNLEKINITNDLSLTEISQNLFGRYDVFTNGIKNKLRVLTPRKKKETDENFEDRINKIFKTQKSFSIAFLNKLPQPEMEDGKPRNIEDYFITQGAINTKSIQKEDIFAQIENAYEDAQVFLQIKDTDNKLSQNKTAVEKIKTLLDALKELQHFIKPLLGSGEENEKDELFYGSFLAIWDELDTITPLYNKVRNWLTRKPYSTEKIKLNFDNAQLLGGWDVNKEHDCAGILLRKNDSYYLGIINKKTNHIFDTDITPSDGECYDKIDYKLLPGANKMLPKVFFSKSRIKEFEPSEAIINCYKKGTHKKGKNFNLTDCHRLINFFKTSIEKHEDWSKFGFKFSDTETYEDISGFYREVEQQGYRLTSHPVSASYIHSLVKEGKLYLFQIWNKDFSQFSKGTPNLHTLYWKMLFDKRNLSDVVYKLNGQAEVFYRKSSIEHQNRIIHPAQHPITNKNELNKKHTSTFKYDIIKDRRYTVDKFQFHVPITINFKATGQNNINPIVQEVIRQNGITHIIGIDRGERHLLYLSLIDLKGNIIKQMTLNEIINEYKGVTYKTNYHNLLEKREKERTEARHSWSSIESIKELKDGYMSQVIHKITDMMVKYNAIVVLEDLNGGFMRGRQKVEKQVYQKFEKKLIDKLNYLVDKKLDANEVGGVLNAYQLTNKFESFKKIGKQSGFLFYIPAWNTSKIDPITGFVNLFNTRYESIKETKVFWSKFDIIRYNKEKNWFEFVFDYNTFTTKAEGTRTKWTLCTHGTRIQTFRNPEKNAQWDNKEINLTESFKALFEKYKIDITSNLKESIMQETEKKFFQELHNLLHLTLQMRNSVTGTDIDYLISPVADEDGNFYDSRINGKNFPENADANGAYNIARKGLMLIRQIKQADPQKKFKFETITNKDWLKFAQDKPYLKD

SEQ ID NO: 63 - protein, 1231 aa, Butyrivibrio fibrisolvens
  MISC_FEATURE (1)..(1231): Genbank WP_027216152 Cpf1
MYYESLTKLYPIKKTIRNELVPIGKTLENIKKNNILEADEDRKIAYIRVKAIMDDYHKRLINEALSGFALIDLDKAANLYLSRSKSADDIESFSRFQDKLRKAIAKRLREHENFGKIGNKDIIPLLQKLSENEDDYNALESFKNFYTYFESYNDVRLNLYSDKEKSSTVAYRLINENLPRFLDNIRAYDAVQKAGITSEELSSEAQDGLFLVNTFNNVLIQDGINTYNEDIGKLNVAINLYNQKNASVQGFRKVPKMKVLYKQILSDREESFIDEFESDTELLDSLESHYANLAKYFGSNKVQLLFTALRESKGVNVYVKNDIAKTSFSNVVFGSWSRIDELINGEYDDNNNRKKDEKYYDKRQKELKKNKSYTIEKIITLSTEDVDVIGKYIEKLESDIDDIRFKGKNFYEAVLCGHDRSKKLSKNKGAVEAIKGYLDSVKDFERDLKLINGSGQELEKNLVVYGEQEAVLSELSGIDSLYNMTRNYLTKKPFSTEKIKLNFNKPTFLDGWDYGNEEAYLGFFMIKEGNYFLAVMDANWNKEFRNIPSVDKSDCYKKVIYKQISSPEKSIQNLMVIDGKTVKKNGRKEKEGIHSGENLILEELKNTYLPKKINDIRKRRSYLNGDTFSKKDLTEFIGYYKQRVIEYYNGYSFYFKSDDDYASFKEFQEDVGRQAYQISYVDVPVSFVDDLINSGKLYLFRVYNKDFSEYSKGRLNLHTLYFKMLFDERNLKNVVYKLNGQAEVFYRPSSIKKEELIVHRAGEEIKNKNPKRAAQKPTRRLDYDIVKDRRYSQDKFMLHTSIIMNFGAEENVSFNDIVNGVLRNEDKVNVIGIDRGERNLLYVVVIDPEGKILEQRSLNCITDSNLDIETDYHRLLDEKESDRKIARRDWTTIENIKELKAGYLSQVVHIVAELVLKYNAIICLEDLNFGFKRGRQKVEKQVYQKFEKMLIDKLNYLVMDKSREQLSPEKISGALNALQLTPDFKSFKVLGKQTGIIYYVPAYLTSKIDPMTGFANLFYVKYENVDKAKEFFSKFDSIKYNKDGKNWNTKGYFEFAFDYKKFTDRAYGRVSEWTVCTVGERIIKFKNKEKNNSYDDKVIDLTNSLKELFDSYKVTYESEVDLKDAILAIDDPAFYRDLTRRLQQTLQMRNSSCDGSRDYIISPVKNSKGEFFCSDNNDDTTPNDADANGAFNIARKGLWVLNEIRNSEEGSKINLAMSNAQWLEYAQDNTI

SEQ ID NO: 64 - protein, 1235 aa, Anaerovibrio sp.
  MISC_FEATURE (1)..(1235): Genbank WP_027407524 Cpf1
MVAFIDEFVGQYPVSKTLRFEARPVPETKKWLESDQCSVLFNDQKRNEYYGVLKELLDDYYRAYIEDALTSFTLDKALLENAYDLYCNRDTNAFSSCCEKLRKDLVKAFGNLKDYLLGSDQLKDLVKLKAKVDAPAGKGKKKIEVDSRLINWLNNNAKYSAEDREKYIKAIESFEGFVTYLTNYKQARENMFSSEDKSTAIAFRVIDQNMVTYFGNIRIYEKIKAKYPELYSALKGFEKFFSPTAYSEILSQSKIDEYNYQCIGRPIDDADFKGVNSLINEYRQKNGIKARELPVMSMLYKQILSDRDNSFMSEVINRNEEAIECAKNGYKVSYALFNELLQLYKKIFTEDNYGNIYVKTQPLTELSQALFGDWSILRNALDNGKYDKDIINLAELEKYFSEYCKVLDADDAAKIQDKFNLKDYFIQKNALDATLPDLDKITQYKPHLDAMLQAIRKYKLFSMYNGRKKMDVPENGIDFSNEFNAIYDKLSEFSILYDRIRNFATKKPYSDEKMKLSFNMPTMLAGWDYNNETANGCFLFIKDGKYFLGVADSKSKNIFDFKKNPHLLDKYSSKDIYYKVKYKQVSGSAKMLPKVVFAGSNEKIFGHLISKRILEIREKKLYTAAAGDRKAVAEWIDFMKSAIAIHPEWNEYFKFKFKNTAEYDNANKFYEDIDKQTYSLEKVEIPTEYIDEMVSQHKLYLFQLYTKDFSDKKKKKGTDNLHTMYWHGVFSDENLKAVTEGTQPIIKLNGEAEMFMRNPSIEFQVTHEHNKPIANKNPLNTKKESVFNYDLIKDKRYTERKFYFHCPITLNFRADKPIKYNEKINRFVENNPDVCIIGIDRGERHLLYYTVINQTGDILEQGSLNKISGSYTNDKGEKVNKETDYHDLLDRKEKGKHVAQQAWETIENIKELKAGYLSQVVYKLTQLMLQYNAVIVLENLNVGFKRGRTKVEKQVYQKFEKAMIDKLNYLVFKDRGYEMNGSYAKGLQLTDKFESFDKIGKQTGCIYYVIPSYTSHIDPKTGFVNLLNAKLRYENITKAQDTIRKFDSISYNAKADYFEFAFDYRSFGVDMARNEWVVCTCGDLRWEYSAKTRETKAYSVTDRLKELFKAHGIDYVGGENLVSHITEVADKHFLSTLLFYLRLVLKMRYTVSGTENENDFILSPVEYAPGKFFDSREATSTEPMNADANGAYHIALKGLMTIRGIEDGKLHNYGKGGENAAWFKFMQNQEYKNNG

SEQ ID NO: 65 - protein, 1205 aa, Pseudobutyrivibrio ruminis
  MISC_FEATURE (1)..(1205): Genbank WP_028248456 Cpf1
MYYQNLTKMYPISKTLRNELIPVGKTLENIRKNGILEADIQRKADYEHVKKLMDNYHKQLINEALQGVHLSDLSDAYDLYFNLSKEKNSVDAFSKCQDKLRKEIVSLLKNHENFPKIGNKEIIKLLQSLYDNDTDYKALDSFSNFYTYFSSYNEVRKNLYSDEEKSSTVAYRLINENLPKFLDNIKAYAIAKKAGVRAEGLSEEDQDCLFIIETFERTLTQDGIDNYNAAIGKLNTAINLFNQQNKKQEGFRKVPQMKCLYKQILSDREEAFIDEFSDDEDLITNIESFAENMNVFLNSEIITDFKIALVESDGSLVYIKNDVSKTSFSNIVFGSWNAIDEKLSDEYDLANSKKKKDEKYYEKRQKELKKNKSYDLETIIGLFDDNSDVIGKYIEKLESDITAIAEAKNDFDEIVLRKHDKNKSLRKNTNAVEAIKSYLDTVKDFERDIKLINGSGQEVEKNLVVYAEQENILAEIKNVDSLYNMSRNYLTQKPFSTEKFKLNFNRATLLNGWDKNKETDNLGILFEKDGMYYLGIMNTKANKIFVNIPKATSNDVYHKVNYKLLPGPNKMLPKVFFAQSNLDYYKPSEELLAKYKAGTHKKGDNFSLEDCHALIDFFKASIEKHPDWSSFGFEFSETCTYEDLSGFYREVEKQGYKITYTDVDADYITSLVERDELYLFQIYNKDFSPYSKGNLNLHTIYLQMLFDQRNLNNVVYKLNGEAEVFYRPASINDEEVIIHKAGEEIKNKNSKRAVDKPTSKFGYDIIKDRRYSKDKFMLHIPVTMNFGVDETRRFNDVVNDALRNDEKVRVIGIDRGERNLLYVVVVDTDGTILEQISLNSIINNEYSIETDYHKLLDEKEGDRDRARKNWTTIENIKELKEGYLSQVVNVIAKLVLKYNAIICLEDLNFGFKRGRQKVEKQVYQKFEKMLIDKLNYLVIDKSRKQDKPEEFGGALNALQLTSKFTSFKDMGKQTGIIYYVPAYLTSKIDPTTGFANLFYVKYENVEKAKEFFSRFDSISYNNESGYFEFAFDYKKFTDRACGARSQWTVCTYGERIIKFRNTEKNNSFDDKTIVLSEEFKELFSIYGISYEDGAELKNKIMSVDEADFFRSLTRLFQQTMQMRNSSNDVTRDYIISPIMNDRGEFFNSEACDASKPKDADANGAFNIARKGLWVLEQIRNTPSGDKLNLAMSNAEWLEYAQRNQI

SEQ ID NO: 66 - protein, 1154 aa, Proteocatella sphenisci
  MISC_FEATURE (1)..(1154): Genbank WP_028830240 Cpf1
MENFKNLYPINKTLRFELRPYGKTLENFKKSGLLEKDAFKANSRRSMQAIIDEKFKETIEERLKYTEFSECDLGNMTSKDKKITDKAATNLKKQVILSFDDEIFNNYLKPDKNIDALFKNDPSNPVISTFKGFTTYFVNFFEIRKHIFKGESSGSMAYRIIDENLTTYLNNIEKIKKLPEELKSQLEGIDQIDKLNNYNEFITQSGITHYNEIIGGISKSENVKIQGINEGINLYCQKNKVKLPRLTPLYKMILSDRVSNSFVLDTIENDTELIEMISDLINKTEISQDVIMSDIQNIFIKYKQLGNLPGISYSSIVNAICSDYDNNFGDGKRKKSYENDRKKHLETNVYSINYISELLTDTDVSSNIKMRYKELEQNYQVCKENFNATNWMNIKNIKQSEKTNLIKDLLDILKSIQRFYDLFDIVDEDKNPSAEFYTWLSKNAEKLDFEFNSVYNKSRNYLTRKQYSDKKIKLNFDSPTLAKGWDANKEIDNSTIIMRKFNNDRGDYDYFLGIWNKSTPANEKIIPLEDNGLFEKMQYKLYPDPSKMLPKQFLSKIWKAKHPTTPEFDKKYKEGRHKKGPDFEKEFLHELIDCFKHGLVNHDEKYQDVFGFNLRNTEDYNSYTEFLEDVERCNYNLSFNKIADTSNLINDGKLYVFQIWSKDFSIDSKGTKNLNTIYFESLFSEENMIEKMFKLSGEAEIFYRPASLNYCEDIIKKGHHHAELKDKFDYPIIKDKRYSQDKFFFHVPMVINYKSEKLNSKSLNNRTNENLGQFTHIIGIDRGERHLIYLTVVDVSTGEIVEQKHLDEIINTDTKGVEHKTHYLNKLEEKSKTRDNERKSWEAIETIKELKEGYISHVINEIQKLQEKYNALIVMENLNYGFKNSRIKVEKQVYQKFETALIKKFNYIIDKKDPETYIHGYQLTNPITTLDKIGNQSGIVLYIPAWNTSKIDPVTGFVNLLYADDLKYKNQEQAKSFIQKIDNIYFENGEFKFDIDFSKWNNRYSISKTKWTLTSYGTRIQTFRNPQKNNKWDSAEYDLTEEFKLILNIDGTLKSQDVETYKKFMSLFKLMLQLRNSVTGTDIDYMISPVTDKTGTHFDSRENIKNLPADADANGAYNIARKGIMAIENIMNGISDPLKISNEDYLKYIQNQQE

SEQ ID NO: 67 - protein, 1206 aa, Butyrivibrio sp.
  MISC_FEATURE (1)..(1206): Genbank WP_035798880 Cpf1
MYYQNLTKKYPVSKTIRNELIPIGKTLENIRKNNILESDVKRKQDYEHVKGIMDEYHKQLINEALDNYMLPSLNQAAEIYLKKHVDVEDREEFKKTQDLLRREVTGRLKEHENYTKIGKKDILDLLEKLPSISEEDYNALESFRNFYTYFTSYNKVRENLYSDEEKSSTVAYRLINENLPKFLDNIKSYAFVKAAGVLADCIEEEEQDALFMVETFNMTLTQEGIDMYNYQIGKVNSAINLYNQKNHKVEEFKKIPKMKVLYKQILSDREEVFIGEFKDDETLLSSIGAYGNVLMTYLKSEKINIFFDALRESEGKNVYVKNDLSKTTMSNIVFGSWSAFDELLNQEYDLANENKKKDDKYFEKRQKELKKNKSYTLEQMSNLSKEDISPIENYIERISEDIEKICIYNGEFEKIVVNEHDSSRKLSKNIKAVKVIKDYLDSIKELEHDIKLINGSGQELEKNLVVYVGQEEALEQLRPVDSLYNLTRNYLTKKPFSTEKVKLNFNKSTLLNGWDKNKETDNLGILFFKDGKYYLGIMNTTANKAFVNPPAAKTENVFKKVDYKLLPGSNKMLPKVFFAKSNIGYYNPSTELYSNYKKGTHKKGPSFSIDDCHNLIDFFKESIKKHEDWSKFGFEFSDTADYRDISEFYREVEKQGYKLTFTDIDESYINDLIEKNELYLFQIYNKDFSEYSKGKLNLHTLYFMMLFDQRNLDNVVYKLNGEAEVFYRPASIAENELVIHKAGEGIKNKNPNRAKVKETSTFSYDIVKDKRYSKYKFTLHIPITMNFGVDEVRRFNDVINNALRTDDNVNVIGIDRGERNLLYVVVINSEGKILEQISLNSIINKEYDIETNYHALLDEREDDRNKARKDWNTIENIKELKTGYLSQVVNVVAKLVLKYNAIICLEDLNFGFKRGRQKVEKQVYQKFEKMLIEKLNYLVIDKSREQVSPEKMGGALNALQLTSKFKSFAELGKQSGIIYYVPAYLTSKIDPTTGFVNLFYIKYENIEKAKQFFDGFDFIRFNKKDDMFEFSFDYKSFTQKACGIRSKWIVYTNGERIIKYPNPEKNNLFDEKVINVTDEIKGLFKQYRIPYENGEDIKEIIISKAEADFYKRLFRLLHQTLQMRNSTSDGTRDYIISPVKNDRGEFFCSEFSEGTMPKDADANGAYNIARKGLWVLEQIRQKDEGEKVNLSMTNAEWLKYAQLHLL

SEQ ID NO: 68 - protein, 1264 aa, Moraxella caprae
  MISC_FEATURE (1)..(1264): Genbank WP_036388671 Cpf1
MLFQDFTHLYPLSKTMRFELKPIGKTLEHIHAKNFLSQDETMADMYQKVKAILDDYHRDFIADMMGEVKLTKLAEFYDVYLKFRKNPKDDGLQKQLKDLQAVLRKEIVKPIGNGGKYKAGYDRLFGAKLFKDGKELGDLAKFVIAQEGESSPKLAHLAHFEKFSTYFTGFHDNRKNMYSDEDKHTAITYRLIHENLPRFIDNLQILATIKQKHSALYDQIINELTASGLDVSLASHLDGYHKLLTQEGITAYNTLLGGISGEAGSRKIQGINELINSHHNQHCHKSERIAKLRPLHKQILSDGMGVSFLPSKFADDSEMCQAVNEFYRHYADVFAKVQSLFDGFDDHQKDGIYVEHKNLNELSKQAFGDFALLGRVLDGYYVDVVNPEFNERFAKAKTDNAKAKLTKEKDKFIKGVHSLASLEQAIEHYTARHDDESVQAGKLGQYFKHGLAGVDNPIQKIHNNHSTIKGFLERERPAGERALPKIKSGKNPEMTQLRQLKELLDNALNVAHFAKLLTTKTTLDNQDGNFYGEFGALYDELAKIPTLYNKVRDYLSQKPFSTEKYKLNFGNPTLLNGWDLNKEKDNFGIILQKDGCYYLALLDKAHKKVFDNAPNTGKNVYQKMIYKLLPGPNKMLPKVFFAKSNLDYYNPSAELLDKYAQGTHKKGNNFNLKDCHALIDFFKAGINKHPEWQHFGFKFSPTSSYQDLSDFYREVEPQGYQVKFVDINADYINELVEQGQLYLFQIYNKDFSPKAHGKPNLHTLYFKALFSKDNLANPIYKLNGEAQIFYRKASLDMNETTIHRAGEVLENKNPDNPKKRQFVYDIIKDKRYTQDKFMLHVPITMNFGVQGMTIKEFNKKVNQSIQQYDEVNVIGIDRGERHLLYLTVINSKGEILEQRSLNDITTASANGTQMTTPYHKILDKREIERLNARVGWGEIETIKELKSGYLSHVVHQISQLMLKYNAIVVLEDLNFGFKRGRFKVEKQIYQNFENALIKKLNHLVLKDEADDEIGSYKNALQLTNNFTDLKSIGKQTGFLFYVPAWNTSKIDPETGFVDLLKPRYENIAQSQAFFGKFDKICYNADKDYFEFHIDYAKFTDKAKNSRQIWKICSHGDKRYVYDKTANQNKGATKGINVNDELKSLFARHHINDKQPNLVMDICQNNDKEFHKSLIYLLKTLLALRYSNASSDEDFILSPVANDEGMFFNSALADDTQPQNADANGAYHIALKGLWVLEQIKNSDDLNKVKLAIDNQTWLNFAQNR

SEQ ID NO: 69 - protein, 1259 aa, Synergistes jonesii; identical to SEQ ID NO: 59
  MISC_FEATURE (1)..(1259): Genbank WP_037975888 Cpf1

SEQ ID NO: 70 - protein, 1264 aa, Prevotella brevis
  MISC_FEATURE (1)..(1264): Genbank WP_044110123 Cpf1
MKQFTNLYQLSKTLRFELKPIGKTLEHINANGFIDNDAHRAESYKKVKKLIDDYHKDYIENVLNNFKLNGEYLQAYFDLYSQDTKDKQFKDIQDKLRKSIASALKGDDRYKTIDKKELIRQDMKTFLKKDTDKALLDEFYEFTTYFTGYHENRKNMYSDEAKSTAIAYRLIHDNLPKFIDNIAVFKKIANTSVADNFSTIYKNFEEYLNVNSIDEIFSLDYYNIVLTQTQIEVYNSIIGGRTLEDDTKIQGINEFVNLYNQQLANKKDRLPKLKPLFKQILSDRVQLSWLQEEFNTGADVLNAVKEYCTSYFDNVEESVKVLLTGISDYDLSKIYITNDLALTDVSQRMFGEWSIIPNAIEQRLRSDNPKKTNEKEEKYSDRISKLKKLPKSYSLGYINECISELNGIDIADYYATLGAINTESKQEPSIPTSIQVHYNALKPILDTDYPREKNLSQDKLTVMQLKDLLDDFKALQHFIKPLLGNGDEAEKDEKFYGELMQLWEVIDSITPLYNKVRNYCTRKPFSTEKIKVNFENAQLLDGWDENKESTNASIILRKNGMYYLGIMKKEYRNILTKPMPSDGDCYDKVVYKFFKDITTMVPKCTTQMKSVKEHFSNSNDDYTLFEKDKFIAPVVITKEIFDLNNVLYNGVKKFQIGYLNNTGDSFGYNHAVEIWKSFCLKFLKAYKSTSIYDFSSIEKNIGCYNDLNSFYGAVNLLLYNLTYRKVSVDYIHQLVDEDKMYLFMIYNKDFSTYSKGTPNMHTLYWKMLFDESNLNDVVYKLNGQAEVFYRKKSITYQHPTHPANKPIDNKNVNNPKKQSNFEYDLIKDKRYTVDKFMFHVPITLNFKGMGNGDINMQVREYIKTTDDLHFIGIDRGERHLLYICVINGKGEIVEQYSLNEIVNNYKGTEYKTDYHTLLSERDKKRKEERSSWQTIEGIKELKSGYLSQVIHKITQLMIKYNAIVLLEDLNMGFKRGRQKVESSVYQQFEKALIDKLNYLVDKNKDANEIGGLLHAYQLTNDPKLPNKNSKQSGFLFYVPAWNTSKIDPVTGFVNLLDTRYENVAKAQAFFKKFDSIRYNKEYDRFEFKFDYSNFTAKAEDTRTQWTLCTYGTRIETFRNAEKNSNWDSREIDLTTEWKTLFTQHNIPLNANLKEAILLQANKNFYTDILHLMKLTLQMRNSVTGTDIDYMVSPVANECGEFFDSRKVKEGLPVNADANGAYNIARKGLWLAQQIKNANDLSDVKLAITNKEWLQFAQKKQYLKD

SEQ ID NO: 71 - protein, 1273 aa, Flavobacterium sp.
  MISC_FEATURE (1)..(1273): Genbank WP_045971446 Cpf1
MKNFSNLYQVSKTVRFELKPIGNTLENIKNKSLLKNDSIRAESYQKMKKTIDEFHKYFIDLALNNKKLSYLNEYIALYTQSAEAKKEDKFKADFKKVQDNLRKEIVSSFTEGEAKAIFSVLDKKELITIELEKWKNENNLAVYLDESFKSFTTYFTGFHQNRKNMYSAEANSTAIAYRLIHENLPKFIENSKAFEKSSQIAELQPKIEKLYKEFEAYLNVNSISELFEIDYFNEVLTQKGITVYNNIIGGRTATEGKQKIQGLNEIINLYNQTKPKNERLPKLKQLYKQILSDRISLSFLPDAFTEGKQVLKAVFEFYKINLLSYKQDGVEESQNLLELIQQVVKNLGNQDVNKIYLKNDTSLTTIAQQLFGDFSVFSAALQYRYETVVNPKYTAEYQKANEAKQEKLDKEKIKFVKQDYFSIAFLQEVVADYVKTLDENLDWKQKYTPSCIADYFTTHFIAKKENEADKTFNFIANIKAKYQCIQGILEQADDYEDELKQDQKLIDNIKFFLDAILEVVHFIKPLHLKSESITEKDNAFYDVFENYYEALNVVTPLYNMVRNYVTQKPYSTEKIKLNFENAQLLNGWDANKEKDYLTTILKRDGNYFLAIMDKKHNKTFQQFTEDDENYEKIVYKLLPGVNKMLPKVFFSNKNIAFFNPSKEILDNYKNNTHKKGATFNLKDCHALIDFFKDSLNKHEDWKYFDFQFSETKTYQDLSGFYKEVEHQGYKINFKKVSVSQIDTLIEEGKMYLFQIYNKDFSPYAKGKPNMHTLYWKALFETQNLENVIYKLNGQAEIFFRKASIKKKNIITHKAHQPIAAKNPLTPTAKNTFAYDLIKDKRYTVDKFQFHVPITMNFKATGNSYINQDVLAYLKDNPEVNIIGLDRGERHLVYLTLIDQKGTILLQESLNVIQDEKTHTPYHTLLDNKEIARDKARKNWGSIESIKELKEGYISQVVHKITKMMIEHNAIVVMEDLNFGFKRGRFKVEKQIYQKLEKMLIDKLNYLVLKDKQPHELGGLYNALQLTNKFESFQKMGKQSGFLFYVPAWNTSKIDPTTGFVNYFYTKYENVEKAKTFFSKFDSILYNKTKGYFEFVVKNYSDFNPKAADTRQEWTICTHGERIETKRQKEQNNNFVSTTIQLTEQFVNFFEKVGLDLSKELKTQLIAQNEKSFFEELFHLLKLTLQMRNSESHTEIDYLISPVANEKGIFYDSRKATASLPIDADANGAYHIAKKGLWIMEQINKTNSEDDLKKVKLAISNREWLQYVQQVQKK

SEQ ID NO: 72 - protein, 973 aa, Sneathia amnii
  MISC_FEATURE (1)..(973): Genbank WP_046328599 Cpf1
MTEEDTKSFVDEILLTPESVIKTIDNFIDSIIMNDIEGLKEEFLKISLENFEGIYISNKKLNEISNRKFGDYNSINMMIKQSMNEKGILSKKEINELIPDLENINKPKVKSFNLSFIFENLTKEHKELIIDYIRENICNVIENVKITIEKYRNIDNKIEFKNNAEKVSKIKEMLESINELCKLIKEFNTDEIEKNNEFYNILNKNFEIFESSYKVLNKVRNFVTKKEVIENKMKLNFSNYQLGNGWHKNKEKDCSIILFRKRNNERWIYYLGILKHGTKIKENDYLSSVDTGFYKMDYYAQNSLSKMIPKCSITVKNVKNAPEDESVILNDSKKFNEPLEITPEIRKLYGNNEHIKGDKFKKESLVKWIDFCKEFLLKYKSFEKAKKEILKLKESNLYENLEEFYSDAEEKAYFLEFINIDEDKIKKLVKEKNLYLFQIYNKDFSAYSTGNKNLHTMYFEELFTDENLKKPVFKLNGNTEVFYRIASSKPKIVHNKGEKLVNKTYLDDGIIKTIPDSVYEEISEKVKNNEDYSKLLEENNIKNLEIKVATHEIVKDKRYFENKFLFYLPITLNKKVSNKNTNKNINKNVIDEIKDCNEYNVIGIDRGERNLISLCIINQNGEIILQKEMNIIQSSDKYNVDYNEKLEIKSKERDNAKKNWSEIGKIKDLKSGYLSAVVHEIVKLAIEYNAVIILEDLNNGFKNSRKKVDKQIYQKFERALIEKLQFLIFKNYDKNEKGGLRNAFQLTPELKNITKVASQQGIIIYTNPAYTSKIDPTTGYANIIKKSNNNEESIVKAIDKISYDKEKDMFYFDINLSNSSFNLTVKNVLKKEWRIYTNGERIIYKDRKYITLNITQEMKDILSKCGIDYLNIDNLKQDILKNKLHKKVYYIFELANKMRNENKDVDYIISPVLNKDGKFFMTQEINELTPKDADLNGAYNIALKGKLMIDNLNKKEKFVFLSNEDWLNFIQGR

SEQ ID NO: 73 - protein, 1238 aa, Candidatus Methanoplasma
  MISC_FEATURE (1)..(1238): Genbank WP_048112740 Cpf1
MNNYDEFTKLYPIQKTIRFELKPQGRTMEHLETFNFFEEDRDRAEKYKILKEAIDEYHKKFIDEHLTNMSLDWNSLKQISEKYYKSREEKDKKVFLSEQKRMRQEIVSEFKKDDRFKDLFSKKLFSELLKEEIYKKGNHQEIDALKSFDKFSGYFIGLHENRKNMYSDGDEITAISNRIVNENFPKFLDNLQKYQEARKKYPEWIIKAESALVAHNIKMDEVFSLEYFNKVLNQEGIQRYNLALGGYVTKSGEKMMGLNDALNLAHQSEKSSKGRIHMTPLFKQILSEKESFSYIPDVFTEDSQLLPSIGGFFAQIENDKDGNIFDRALELISSYAEYDTERIYIRQADINRVSNVIFGEWGTLGGLMREYKADSINDINLERTCKKVDKWLDSKEFALSDVLEAIKRTGNNDAFNEYISKMRTAREKIDAARKEMKFISEKISGDEESIHIIKTLLDSVQQFLHFFNLFKARQDIPLDGAFYAEFDEVHSKLFAIVPLYNKVRNYLTKNNLNTKKIKLNFKNPTLANGWDQNKVYDYASLIFLRDGNYYLGIINPKRKKNIKFEQGSGNGPFYRKMVYKQIPGPNKNLPRVFLTSTKGKKEYKPSKEIIEGYEADKHIRGDKFDLDFCHKLIDFFKESIEKHKDWSKFNFYFSPTESYGDISEFYLDVEKQGYRMHFENISAETIDEYVEKGDLFLFQIYNKDFVKAATGKKDMHTIYWNAAFSPENLQDVVVKLNGEAELFYRDKSDIKEIVHREGEILVNRTYNGRTPVPDKIHKKLTDYHNGRTKDLGEAKEYLDKVRYFKAHYDITKDRRYLNDKIYFHVPLTLNFKANGKKNLNKMVIEKFLSDEKAHIIGIDRGERNLLYYSIIDRSGKIIDQQSLNVIDGFDYREKLNQREIEMKDARQSWNAIGKIKDLKEGYLSKAVHEITKMAIQYNAIVVMEELNYGFKRGRFKVEKQIYQKFENMLIDKMNYLVFKDAPDESPGGVLNAYQLTNPLESFAKLGKQTGILFYVPAAYTSKIDPTTGFVNLFNTSSKTNAQERKEFLQKFESISYSAKDGGIFAFAFDYRKFGTSKTDHKNVWTAYTNGERMRYIKEKKRNELFDPSKEIKEALTSSGIKYDGGQNILPDILRSNNNGLIYTMYSSFIAAIQMRVYDGKEDYIISPIKNSKGEFFRTDPKRRELPIDADANGAYNIALRGELTMRAIAEKFDPDSEKMAKLELKHKDWFEFMQTRGD

SEQ ID NO: 74 - protein, 1222 aa, Oribacterium sp.
  MISC_FEATURE (1)..(1222): Genbank WP_049895985 Cpf1
METEILKYDFFEREGKYMYYDGLTKQYALSKTIRNELVPIGKTLDNIKKNRILEADIKRKSDYEHVKKLMDMYHKKIINEALDNFKLSVLEDAADIYFNKQNDERDIDAFLKIQDKLRKEIVEQLKGHTDYSKVGNKDFLGLLKAASTEEDRILIESFDNFYTYFTSYNKVRSNLYSAEDKSSTVAYRLINENLPKFFDNIKAYRTVRNAGVISGDMSIVEQDELFEVDTFNHTLTQYGIDTYNHMIGQLNSAINLYNQKMHGAGSFKKLPKMKELYKQLLTEREEEFIEEYTDDEVLITSVHNYVSYLIDYLNSDKVESFFDTLRKSDGKEVFIKNDVSKTTMSNILFDNWSTIDDLINHEYDSAPENVKKTKDDKYFEKRQKDLKKNKSYSLSKIAALCRDTTILEKYIRRLVDDIEKIYTSNNVFSDIVLSKHDRSKKLSKNTNAVQAIKNMLDSIKDFEHDVMLINGSGQEIKKNLNVYSEQEALAGILRQVDHIYNLTRNYLTKKPFSTEKIKLNFNRPTFLDGWDKNKEEANLGILLIKDNRYYLGIMNTSSNKAFVNPPKAISNDIYKKVDYKLLPGPNKMLPKVFFATKNIAYYAPSEELLSKYRKGTHKKGDSFSIDDCRNLIDFFKSSINKNTDWSTFGFNFSDTNSYNDISDFYREVEKQGYKLSFTDIDACYIKDLVDNNELYLFQIYNKDFSPYSKGKLNLHTLYFKMLFDQRNLDNVVYKLNGEAEVFYRPASIESDEQIIHKSGQNIKNKNQKRSNCKKTSTFDYDIVKDRRYCKDKFMLHLPITVNFGTNESGKFNELVNNAIRADKDVNVIGIDRGERNLLYVVVVDPCGKIIEQISLNTIVDKEYDIETDYHQLLDEKEGSRDKARKDWNTIENIKELKEGYLSQVVNIIAKLVLKYDAIICLEDLNFGFKRGRQKVEKQVYQKFEKMLIDKMNYLVLDKSRKQESPQKPGGALNALQLTSAFKSFKELGKQTGIIYYVPAYLTSKIDPTTGFANLFYIKYESVDKARDFFSKFDFIRYNQMDNYFEFGFDYKSFTERASGCKSKWIACTNGERIVKYRNSDKNNSFDDKTVILTDEYRSLFDKYLQNYIDEDDLKDQILQIDSADFYKNLIKLFQLTLQMRNSSSDGKRDYIISPVKNYREEFFCSEFSDDTFPRDADANGAYNIARKGLWVIKQIRETKSGTKINLAMSNSEWLEYAQCNLL

SEQ ID NO: 75 - protein, 1326 aa, Prevotella disiens
  MISC_FEATURE (1)..(1326): Genbank WP_050786240 Cpf1
MKVMENYQEFTNLFQLNKTLRFELKPIGKTCELLEEGKIFASGSFLEKDKVRADNVSYVKKEIDKKHKIFIEETLSSFSISNDLLKQYFDCYNELKAFKKDCKSDEEEVKKTALRNKCTSIQRAMREAISQAFLKSPQKKLLAIKNLIENVFKADENVQHFSEFTSYFSGFETNRENFYSDEEKSTSIAYRLVHDNLPIFIKNIYIFEKLKEQFDAKTLSEIFENYKLYVAGSSLDEVFSLEYFNNTLTQKGIDNYNAVIGKIVKEDKQEIQGLNEHINLYNQKHKDRRLPFFISLKKQILSDREALSWLPDMFKNDSEVIKALKGFYIEDGFENNVLTPLATLLSSLDKYNLNGIFIRNNEALSSLSQNVYRNFSIDEAIDANAELQTFNNYELIANALRAKIKKETKQGRKSFEKYEEYIDKKVKAIDSLSIQEINELVENYVSEFNSNSGNMPRKVEDYFSLMRKGDFGSNDLIENIKTKLSAAEKLLGTKYQETAKDIFKKDENSKLIKELLDATKQFQHFIKPLLGTGEEADRDLVFYGDFLPLYEKFEELTLLYNKVRNRLTQKPYSKDKIRLCFNKPKLMTGWVDSKTEKSDNGTQYGGYLFRKKNEIGEYDYFLGISSKAQLFRKNEAVIGDYERLDYYQPKANTIYGSAYEGENSYKEDKKRLNKVIIAYIEQIKQTNIKKSIIESISKYPNISDDDKVTPSSLLEKIKKVSIDSYNGILSFKSFQSVNKEVIDNLLKTISPLKNKAEFLDLINKDYQIFTEVQAVIDEICKQKTFIYFPISNVELEKEMGDKDKPLCLFQISNKDLSFAKTFSANLRKKRGAENLHTMLFKALMEGNQDNLDLGSGAIFYRAKSLDGNKPTHPANEAIKCRNVANKDKVSLFTYDIYKNRRYMENKFLFHLSIVQNYKAANDSAQLNSSATEYIRKADDLHIIGIDRGERNLLYYSVIDMKGNIVEQDSLNIIRNNDLETDYHDLLDKREKERKANRQNWEAVEGIKDLKKGYLSQAVHQIAQLMLKYNAIIALEDLGQMFVTRGQKIEKAVYQQFEKSLVDKLSYLVDKKRPYNELGGILKAYQLASSITKNNSDKQNGFLFYVPAWNTSKIDPVTGFTDLLRPKAMTIKEAQDFFGAFDNISYNDKGYFEFETNYDKFKIRMKSAQTRWTICTFGNRIKRKKDKNYWNYEEVELTEEFKKLFKDSNIDYENCNLKEEIQNKDNRKFFDDLIKLLQLTLQMRNSDDKGNDYIISPVANAEGQFFDSRNGDKKLPLDADANGAYNIARKGLWNIRQIKQTKNDKKLNLSISSTEWLDFVREKPYLK

SEQ ID NO: 76 - protein, 998 aa, Arcobacter butzleri
  MISC_FEATURE (1)..(998): Genbank WP_052943011 Cpf1
MGLLEHLEGAIVEDMFSLDYFSLTLSQRYIDIYNTMIGGNTLADGTKVQGINENINIYRQKNNIDRKNLPTLKPLHKQLLSDRETLSWIPEAFKTKEEVVGAIEDFYKNNIISFKCCDNIVDITKQFIDIFSLNEDYELNKIFIKNDISITSISQDIFKDYRIIKEALWQKHINENPKAAKSKDLTGDKEKYFSRKNSFFSFEEIISSLKLMGRKIDLFSYFKDNVEYRAHSIETTFIKWQKNKNDKKTTKELLDNILNLQRVLKPLYLKAEVEKDILFYSIFDIYFESLNEIVKLYNKVRDFESKKPYSLEKFKLNFQNSTLLSGWDVNKEPDNTSILLKKDGLYYLGIMDKKHNRVFKNLESSKGGYEKIEYKLLSGPNKMLPKVFFSNKSIGYYNPSPALLEKYKSGVHKKGESFDLNFCHELIDFFKASIDKHEDWKNFNFKFSDTSEYADISGFYREVEQQGYKITFKNIDEEFINTLINEGKLYLFQIYNKDFSTFSKGTKNLHTLYWEMIFNEENLKNVVYKLNGEAEIFYRKKSIEYSEDKMKYGHHYEELKDKFNYPIIKDKRFTMDKFQFHVPITMNFKATGRSYINEEVNDFLRQNSKDVKIIGINRGERHLIYLTMINAKGEIIQQYSLNEIVNSYNNKNFTVNYNEKLSKKEGERAIARENWGVVENIKELKEGYLSHAIHTISNLIVENNAIVVLEDLNFEFKRERLKVEKSIYQKFEKMLIDKLNYLVDKKKDINENGGLLKALQLTNKFESFEKIGKQNGFLFFVNAWNITKICPVTGFVSLFDTRYQSVDKAREFFSKFDSIKYNEEKEHYEFVFDYSNFTDKAKDTKTKWTVCSYGTRIKTFRNSEKNNNWDNKTVSPTEDLSKLLKSCDRDIKEFIISQDKKEFFVELLEIFSLIVQMKNSIINSEIDYIISPVANENGEFFDSRFANSSLPKNADANAAYNTARKGLMLLEKIRDSEIGKKIDMKITNTEWLNFVQER

SEQ ID NO: 77 - protein, 1475 aa, Treponema endosymbiont of Eucomonympha sp.
  MISC_FEATURE (1)..(1475): Genbank WP_062376669 Cpf1
MTAFEELTNLYSVSKTLRFELKPAGKDGNTLSAEESAKLFKEILDQDRKIKDAYLALKPVMDTIHEKIINSSLGSDEARQIDFSAYYIEYNKKDNEYAVKKAEESLRAAIRSAFDKAANELAKNAGNDEKGKPIFKKKKGKDVGVEYLTQAGIIKYIENHIKTLVPQKVKEFIDKKNVINAKGKKITERTGHLAVFDSFFTYFGGYNTNRKNYYTEDKEKATAVATRIVHDNLPKFCDNCIQFSQDKIVTKRKSKETIPARKDEYLNAYQFLKDSEKTTQIKDAATNTMIEAYPVDERTFEIARFSECLTQAGIEEYNRIIGHYNSLINLYNQTRKGESDFRKLEQFKTLHKQIGCGEKKGWRDALKDNEDLKGKLKAISEAGQKYFTASLNPDDITFFSFIDWLKKNEDWDGVYWSKSAVDKVSGVYFANWHDIKDRLKGNKACVHLDKNKELQINDAVELSGLFAVINSGNSESADIHAQEHGLFDALNQENNEDLSKTLFKQSVLDEKASLIDEKLSASKNLINLICADMENLANAFCETSAEIMKITDFKNEANILSIKNWLDTAKSLIWRVKDFDIKESKRKGNAINAELSNMLTELLHADDARWFDWYDLVRNYLTKKPQDDAKANKLKLNFGYGKLLDGFVDSHTDESDASTQYGGYLFRKRTDAQEKSDFEYFLGISKNTKLFRCHLQSTVQNHDKSNFERLEYYQAKSTTYFDAKYSENKAKLVEIIESLIDDRAKTDSELTVIGNEIKKRDGKGEITPSALFDRVKKDKAFSRILNDDTLLKAVTQAIRDLQNSCDNFSERAPRLKEVQKRGYFGIVGFKQIVEDLQTVAKENKVFNFFNVSQPEFENAFISGGKRIYLFKISNKDLSYSETSQKDENGQQKRNFKGIENLHTHYFRALMREYKNCTNVDLGKGEIFFRAPVPEIKKEATHKVYDKMVNRRENETHIAIPEKVHNELLLFANEKIAVNNLSNETKLYLDQNKKIDESRVKIKDVKHDIIKDKRFTEAKYQLHLSILLNFTPTKEEVNAKINDTFTKSDDIQFLGIDRGEKHLIYYSLVDANGTIRAQDHFDVINKTDYLQKITEAAKIRREKQENWQQKGNISNLKDGYISLVVHEIIEKMKDENGSFKPMFIVLEDLNTGFKRSRQKFEQQVYQKFELALAKKLNYLVDKNAKDGELASVSRALQLTPLVMNYQDIENRKQVGIMLYTRANYTSVTDPATGWRKTVYLKPGSEESIKKQILGVFSEIGVDEKGDYFFQYSDTNTERTWRLWSSKNGKSLERYRGRRDKNTNAFTVEPYDVKATLNKLFVGFDKDMSLLKQLKDGKTLSKIDGRKETAWESLRFVIDLIQQIRNSGDTSKNQDDNFLLSPVRNAQGEHFDSRLYQNQETPKLPKDADANGAYNIARKGIIMYAHIRQWINDGGQRFEKSSDLDLFVSDNEWDLWLFDSKQWKEQLQKFASRKQKK

SEQ ID NO: 78 - protein, 1251 aa, Moraxella lacunata
  MISC_FEATURE (1)..(1251): Genbank WP_062499108 Cpf1
MLFQDFTHLYPLSKTVRFELKPIGKTLEHIHAKNFLSQDETMADMYQKVKAILDDYHRDFITKMMSEVTLTKLPEFYEVYLALRKNPKDDTLQKQLTEIQTALREEVVKPIDSGGKYKAGYERLFGAKLFKDGKELGDLAKFVIAQEGESSPKLPQIAHFEKFSTYFTGFHDNRKNMYSSDDKHTAIAYRLIHENLPRFIDNLQILVTIKQKHSVLYDQIVNELNANGLDVSLASHLDGYHKLLTQEGITAYNRIIGEVNSYTNKHNQICHKSERIAKLRPLHKQILSDGMGVSFLPSKFADDSEMCQAVNEFYRHYAHVFAKVQSLFDRFDDYQKDGIYVEHKNLNELSKQAFGDFALLGRVLDGYYVDVVNPEFNDKFAKAKTDNAKEKLTKEKDKFIKGVHSLASLEQAIEHYIAGHDDESVQAGKLGQYFKHGLAGVDNPIQKIHNSHSTIKGFLERERPAGERTLPKIKSDKSLEMTQLRQLKELLDNALNVVHFAKLLTTKTTLDNQDGNFYGEFGALYDELAKIATLYNKVRDYLSQKPFSTEKYKLNFGNPTLLNGWDLNKEKDNFGVILQKDGCYYLALLDKAHKKVFDNAPNTGKSVYQKMVYKLLPGSNKMLPKVFFAKSNLDYYNPSAELLDKYAQGTHKKGDNFNLKDCHALIDFFKASINKHPEWQHFGFEFSLTSSYQDLSDFYREVEPQGYQVKFVDIDADYIDELVEQGQLYLFQIYNKDFSPKAHGKPNLHTLYFKALFSEDNLANPIYKLNGEAEIFYRKASLDMNETTIHRAGEVLENKNPDNPKERQFVYDIIKDKRYTQDKFMLHVPITMNFGVQGMTIKEFNKKVNQSIQQYDEVNVIGIDRGERHLLYLTVINSKGEILEQRSLNDIITTSANGTQMTTPYHKILDKREIERLNARVGWGEIETIKELKSGYLSHVVHQISQLMLKYNAIVVLEDLNFGFKRGRFKVEKQIYQNFENALIKKLNHLVLKDKADNEIGSYKNALQLTNNFTDLKSIGKQTGFLFYVPAWNTSKIDPVTGFVDLLKPRYENIAQSQAFFDKFDKICYNADKGYFEFHIDYAKFTDKAKNSRQIWTICSHGDKRYVYDKTANQNKGATIGINVNDELKSLFARYRINDKQPNLVMDICQNNDKEFHKSLTYLLKALLALRYSNASSDEDFILSPVANDKGVFFNSALADDTQPQNADANGAYHIALKGLWLLNELKNSDDLDKVKLAIDNQTWLNFAQNR

SEQ ID NO: 79 - DNA, 1956 bp, Artificial Sequence
  pWD031 amplified with oWD147/oWD148
aatagtgtatgcggcgaccgagttgctcttgcccggcgtcaatacgggataataccgcgccacatagcagaactttaaaagtgctcatcattggaaaacgttcttcggggcgaaaactctcaaggatcttaccgctgttgagatccagttcgatgtaacccactcgtgcacccaactgatcttcagcatcttttactttcaccagcgtttctgggtgagcaaaaacaggaaggcaaaatgccgcaaaaaagggaataagggcgacacggaaatgttgaatactcatattcttcctttttcaatattattgaagcatttatcagggttattgtctcatgagcggatacatatttgaatgtatttagaaaaataaacaaataggggtcagtgttacaaccaattaaccaattctgaacatggggagagaccgctcttctatgcggctactaatacaaaaggctctagacgaaaaactacgactagctacgccctttcgagaagtcatttaataaggccactgttaaaaggtagaagagcggtctctaaaacagcgctagcggagtgtatactggcttactatgttggcactgatgagggtgtcagtgaagtgcttcatgtggcaggagaaaaaaggctgcaccggtgcgtcagcagaatatgtgatacaggatatattccgcttcctcgctcactgactcgctacgctcggtcgttcgactgcggcgagcggaaatggcttacgaacggggcggagatttcctggaagatgccaggaagatacttaacagggaagtgagagggccgcggcaaagccgtttttccataggctccgcccccctgacaagcatcacgaaatctgacgctcaaatcagtggtggcgaaacccgacaggactataaagataccaggcgtttccccctggcggctccctcgtgcgctctcctgttcctgcctttcggtttaccggtgtcattccgctgttatggccgcgtttgtctcattccacgcctgacactcagttccgggtaggcagttcgctccaagctggactgtatgcacgaaccccccgttcagtccgaccgctgcgccttatccggtaactatcgtcttgagtccaacccggaaagacatgcaaaagcaccactggcagcagccactggtaattgatttagaggagttagtcttgaagtcatgcgccggttaaggctaaactgaaaggacaagttttggtgactgcgctcctccaagccagttacctcggttcaaagagttggtagctcagagaaccttcgaaaaaccgccctgcaaggcggttttttcgttttcagagcaagagattacgcgcagaccaaaacgatctcaagaagatcatcttattaagcttttaccaatgcttaatcagtgaggcacctatctcagcgatctgtctatttcgttcatccatagttgcctgactccccgtcgtgtagataactacgatacgggagggcttaccatctggccccagcgctgcgatgataccgcgagaaccacgctcaccggctccggatttatcagcaataaaccagccagccggaagggccgagcgcagaagtggtcctgcaactttatccgcctccatccagtctattaattgttgccgggaagctagagtaagtagttcgccagttaatagtttgcgcaacgttgttgccatcgctacaggcatcgtggtgtcacgctcgtcgtttggtatggcttcattcagctccggttcccaacgatcaaggcgagttacatgatcccccatgttgtgcaaaaaagcggttagctccttcggtcctccgatcgttgtcagaagtaagttggccgcagtgttatcactcatggttatggcagcactgcataattctcttactgtcatgccatccgtaagatgcttttctgtgactggtgagtactcaaccaagtcattct

SEQ ID NO: 80 - DNA, 3679 bp, Artificial Sequence
  Cpf1 target plasmid with wild Type PAM (Example 4)
acccgccgaagcgggtttttacgttatttgcggattaacgattactcgttatcagaaccgcccaggatgcctggcagttccctactctcgccgctgcgctcggtcgttcggctgcgggacctcagcgctagcggagtgtatactggcttactatgttggcactgatgagggtgtcagtgaagtgcttcatgtggcaggagaaaaaaggctgcaccggtgcgtcagcagaatatgtgatacaggatatattccgcttcctcgctcactgactcgctacgctcggtcgttcgactgcggcgagcggaaatggcttacgaacggggcggagatttcctggaagatgccaggaagatacttaacagggaagtgagagggccgcggcaaagccgtttttccataggctccgcccccctgacaagcatcacgaaatctgacgctcaaatcagtggtggcgaaacccgacaggactataaagataccaggcgtttccccctggcggctccctcgtgcgctctcctgttcctgcctttcggtttaccggtgtcattccgctgttatggccgcgtttgtctcattccacgcctgacactcagttccgggtaggcagttcgctccaagctggactgtatgcacgaaccccccgttcagtccgaccgctgcgccttatccggtaactatcgtcttgagtccaacccggaaagacatgcaaaagcaccactggcagcagccactggtaattgatttagaggagttagtcttgaagtcatgcgccggttaaggctaaactgaaaggacaagttttggtgactgcgctcctccaagccagttacctcggttcaaagagttggtagctcagagaaccttcgaaaaaccgccctgcaaggcggttttttcgttttcagagcaagagattacgcgcagaccaaaacgatctcaagaagatcatcttattaagcttttaccaatgcttaatcagtgaggcacctatctcagcgatctgtctatttcgttcatccatagttgcctgactccccgtcgtgtagataactacgatacgggagggcttaccatctggccccagcgctgcgatgataccgcgagaaccacgctcaccggctccggatttatcagcaataaaccagccagccggaagggccgagcgcagaagtggtcctgcaactttatccgcctccatccagtctattaattgttgccgggaagctagagtaagtagttcgccagttaatagtttgcgcaacgttgttgccatcgctacaggcatcgtggtgtcacgctcgtcgtttggtatggcttcattcagctccggttcccaacgatcaaggcgagttacatgatcccccatgttgtgcaaaaaagcggttagctccttcggtcctccgatcgttgtcagaagtaagttggccgcagtgttatcactcatggttatggcagcactgcataattctcttactgtcatgccatccgtaagatgcttttctgtgactggtgagtactcaaccaagtcattctgagaatagtgtatgcggcgaccgagttgctcttgcccggcgtcaatacgggataataccgcgccacatagcagaactttaaaagtgctcatcattggaaaacgttcttcggggcgaaaactctcaaggatcttaccgctgttgagatccagttcgatgtaacccactcgtgcacccaactgatcttcagcatcttttactttcaccagcgtttctgggtgagcaaaaacaggaaggcaaaatgccgcaaaaaagggaataagggcgacacggaaatgttgaatactcatattcttcctttttcaatattattgaagcatttatcagggttattgtctcatgagcggatacatatttgaatgtatttagaaaaataaacaaataggggtcagtgttacaaccaattaaccaattctgaacattatcgcgagcccatttatacctgaatatggctcataacaccccttgtttgcctggcggcagtagcgcggtggtcccacctgaccccatgccgaactcagaagtgaaacgccgtagcgccgatggtagtgtggggactccccatgcgagagtagggaactgccaggcatcaaataaaacgaaaggctcagtcgaaagactgggcctttcgcccgggctaattatggggtgtcgcccttattcgactcggggcctttagagaagtcatttaataaggccactgttaaaaagcaaaagagtcgaataagggcgacacattctgaaatgagctgttgacaattaatcatccggctcgtatataggaggtaaaaaaatgtcccacttggcggaattggtagcgagcgcgaaagcagcaattagccaggcaagcgacgtggcagcgctggataatgtccgtgtggagtatctgggtaaaaagggccacctgaccctgcaaatgacgaccttgcgtgagttgccgccagaagaacgtccggcagccggtgcggtgattaatgaagcgaaagagcaagtgcaacaggcgctgaatgcccgtaaggctgagctggagagcgctgcgctgaacgcgcgtttggccgcagaaacgatcgacgtgagcctgccgggtcgtcgtatcgagaacggtggcctgcatccggttacgcgtaccatcgaccgcattgagagcttcttcggcgaactgggttttaccgtggcgacgggtccggagatcgaggatgactaccacaacttcgacgctctgaacatcccgggtcaccacccagcacgtgccgaccatgacaccttttggttcgatacgacccgtctgctgcgtacccaaacttccggtgttcagatccgtaccatgaaagcccagcagccgccgattcgtattatcgcgcctggtcgcgtgtatcgcaacgattacgaccagacccacaccccgatgttccatcaaatggaaggcctgattgttgatacgaacatctcttttaccaatctgaaaggcaccctgcatgatttcctgcgtaactttttcgaagaggatctgcagattcgcttccgtccgagctactttccgtttacggagccgtcggcggaagttgatgtcatgggtaagaatggtaagtggctggaagttctgggttgcggcatggttcacccgaatgtcctgcgcaatgtcggcattgaccctgaggtctacagcggctttggttttggtatgggtatggagcgcctgactatgctgcgctatggcgttaccgatttgcgcagctttttcgaaaacgatctgcgcttcctgaaacaattcaagtagaagggcgacacaaaaggtattctaaatgcataataaatactgataacatcttatagtttgtattatattttgtattatcgttgacatgtataattttgatatcaaaaactgattttccctttattattttcgagatttattttcttaattctctttaacaaactagaaatattgtatatacaaaaaatcataaataatagatgaatagtttaattataggtgttcatcaatcgaaaaagcaacgtatcttatttaaagtgcgttgcttttttctcatttataaggttaaataattctcatatatcaagcaaagtgacaggcgcccttaaatattctgacaaatgctctttccctaaactccccccataaaaaa

SEQ ID NO: 81 - DNA, 3679 bp, Artificial Sequence
  Cpf1 target plasmid with mutant PAM (Example 4)
aacccgccgaagcgggtttttacgttatttgcggattaacgattactcgttatcagaaccgcccaggatgcctggcagttccctactctcgccgctgcgctcggtcgttcggctgcgggacctcagcgctagcggagtgtatactggcttactatgttggcactgatgagggtgtcagtgaagtgcttcatgtggcaggagaaaaaaggctgcaccggtgcgtcagcagaatatgtgatacaggatatattccgcttcctcgctcactgactcgctacgctcggtcgttcgactgcggcgagcggaaatggcttacgaacggggcggagatttcctggaagatgccaggaagatacttaacagggaagtgagagggccgcggcaaagccgtttttccataggctccgcccccctgacaagcatcacgaaatctgacgctcaaatcagtggtggcgaaacccgacaggactataaagataccaggcgtttccccctggcggctccctcgtgcgctctcctgttcctgcctttcggtttaccggtgtcattccgctgttatggccgcgtttgtctcattccacgcctgacactcagttccgggtaggcagttcgctccaagctggactgtatgcacgaaccccccgttcagtccgaccgctgcgccttatccggtaactatcgtcttgagtccaacccggaaagacatgcaaaagcaccactggcagcagccactggtaattgatttagaggagttagtcttgaagtcatgcgccggttaaggctaaactgaaaggacaagttttggtgactgcgctcctccaagccagttacctcggttcaaagagttggtagctcagagaaccttcgaaaaaccgccctgcaaggcggttttttcgttttcagagcaagagattacgcgcagaccaaaacgatctcaagaagatcatcttattaagcttttaccaatgcttaatcagtgaggcacctatctcagcgatctgtctatttcgttcatccatagttgcctgactccccgtcgtgtagataactacgatacgggagggcttaccatctggccccagcgctgcgatgataccgcgagaaccacgctcaccggctccggatttatcagcaataaaccagccagccggaagggccgagcgcagaagtggtcctgcaactttatccgcctccatccagtctattaattgttgccgggaagctagagtaagtagttcgccagttaatagtttgcgcaacgttgttgccatcgctacaggcatcgtggtgtcacgctcgtcgtttggtatggcttcattcagctccggttcccaacgatcaaggcgagttacatgatcccccatgttgtgcaaaaaagcggttagctccttcggtcctccgatcgttgtcagaagtaagttggccgcagtgttatcactcatggttatggcagcactgcataattctcttactgtcatgccatccgtaagatgcttttctgtgactggtgagtactcaaccaagtcattctgagaatagtgtatgcggcgaccgagttgctcttgcccggcgtcaatacgggataataccgcgccacatagcagaactttaaaagtgctcatcattggaaaacgttcttcggggcgaaaactctcaaggatcttaccgctgttgagatccagttcgatgtaacccactcgtgcacccaactgatcttcagcatcttttactttcaccagcgtttctgggtgagcaaaaacaggaaggcaaaatgccgcaaaaaagggaataagggcgacacggaaatgttgaatactcatattcttcctttttcaatattattgaagcatttatcagggttattgtctcatgagcggatacatatttgaatgtatttagaaaaataaacaaataggggtcagtgttacaaccaattaaccaattctgaacattatcgcgagcccatttatacctgaatatggctcataacaccccttgtttgcctggcggcagtagcgcggtggtcccacctgaccccatgccgaactcagaagtgaaacgccgtagcgccgatggtagtgtggggactccccatgcgagagtagggaactgccaggcatcaaataaaacgaaaggctcagtcgaaagactgggcctttcgcccgggctaattatggggtgtcgcccttattcgactcggggcctggtgagaagtcatttaataaggccactgttaaaaagcaaaagagtcgaataagggcgacacattctgaaatgagctgttgacaattaatcatccggctcgtatataggaggtaaaaaaatgtcccacttggcggaattggtagcgagcgcgaaagcagcaattagccaggcaagcgacgtggcagcgctggataatgtccgtgtggagtatctgggtaaaaagggccacctgaccctgcaaatgacgaccttgcgtgagttgccgccagaagaacgtccggcagccggtgcggtgattaatgaagcgaaagagcaagtgcaacaggcgctgaatgcccgtaaggctgagctggagagcgctgcgctgaacgcgcgtttggccgcagaaacgatcgacgtgagcctgccgggtcgtcgtatcgagaacggtggcctgcatccggttacgcgtaccatcgaccgcattgagagcttcttcggcgaactgggttttaccgtggcgacgggtccggagatcgaggatgactaccacaacttcgacgctctgaacatcccgggtcaccacccagcacgtgccgaccatgacaccttttggttcgatacgacccgtctgctgcgtacccaaacttccggtgttcagatccgtaccatgaaagcccagcagccgccgattcgtattatcgcgcctggtcgcgtgtatcgcaacgattacgaccagacccacaccccgatgttccatcaaatggaaggcctgattgttgatacgaacatctcttttaccaatctgaaaggcaccctgcatgatttcctgcgtaactttttcgaagaggatctgcagattcgcttccgtccgagctactttccgtttacggagccgtcggcggaagttgatgtcatgggtaagaatggtaagtggctggaagttctgggttgcggcatggttcacccgaatgtcctgcgcaatgtcggcattgaccctgaggtctacagcggctttggttttggtatgggtatggagcgcctgactatgctgcgctatggcgttaccgatttgcgcagctttttcgaaaacgatctgcgcttcctgaaacaattcaagtagaagggcgacacaaaaggtattctaaatgcataataaatactgataacatcttatagtttgtattatattttgtattatcgttgacatgtataattttgatatcaaaaactgattttccctttattattttcgagatttattttcttaattctctttaacaaactagaaatattgtatatacaaaaaatcataaataatagatgaatagtttaattataggtgttcatcaatcgaaaaagcaacgtatcttatttaaagtgcgttgcttttttctcatttataaggttaaataattctcatatatcaagcaaagtgacaggcgcccttaaatattctgacaaatgctctttccctaaactccccccataaaaa

SEQ ID NO: 82 - protein, 1301 aa, Artificial Sequence
  TEV digested FnCpf1
GMSIYQEFVNKYSLSKTLRFELIPQGKTLENIKARGLILDDEKRAKDYKKAKQIIDKYHQFFIEEILSSVCISEDLLQNYSDVYFKLKKSDDDNLQKDFKSAKDTIKKQISEYIKDSEKFKNLFNQNLIDAKKGQESDLILWLKQSKDNGIELFKANSDITDIDEALEIIKSFKGWTTYFKGFHENRKNVYSSNDIPTSIIYRIVDDNLPKFLENKAKYESLKDKAPEAINYEQIKKDLAEELTFDIDYKTSEVNQRVFSLDEVFEIANFNNYLNQSGITKFNTIIGGKFVNGENTKRKGINEYINLYSQQINDKTLKKYKMSVLFKQILSDTESKSFVIDKLEDDSDVVTTMQSFYEQIAAFKTVEEKSIKETLSLLFDDLKAQKLDLSKIYFKNDKSLTDLSQQVFDDYSVIGTAVLEYITQQIAPKNLDNPSKKEQELIAKKTEKAKYLSLETIKLALEEFNKHRDIDKQCRFEEILANFAAIPMIFDEIAQNKDNLAQISIKYQNQGKKDLLQASAEDDVKAIKDLLDQTNNLLHKLKIFHISQSEDKANILDKDEHFYLVFEECYFELANIVPLYNKIRNYITQKPYSDEKFKLNFENSTLANGWDKNKEPDNTAILFIKDDKYYLGVMNKKNNKIFDDKAIKENKGEGYKKIVYKLLPGANKMLPKVFFSAKSIKFYNPSEDILRIRNHSTHTKNGSPQKGYEKFEFNIEDCRKFIDFYKQSISKHPEWKDFGFRFSDTQRYNSIDEFYREVENQGYKLTFENISESYIDSVVNQGKLYLFQIYNKDFSAYSKGRPNLHTLYWKALFDERNLQDVVYKLNGEAELFYRKQSIPKKITHPAKEAIANKNKDNPKKESVFEYDLIKDKRFTEDKFFFHCPITINFKSSGANKFNDEINLLLKEKANDVHILSIDRGERHLAYYTLVDGKGNIIKQDTFNIIGNDRMKTNYHDKLAAIEKDRDSARKDWKKINNIKEMKEGYLSQVVHEIAKLVIEYNAIVVFEDLNFGFKRGRFKVEKQVYQKLEKMLIEKLNYLVFKDNEFDKTGGVLRAYQLTAPFETFKKMGKQTGIIYYVPAGFTSKICPVTGFVNQLYPKYESVSKSQEFFSKFDKICYNLDKGYFEFSFDYKNFGDKAAKGKWTIASFGSRLINFRNSDKNHNWDTREVYPTKELEKLLKDYSIEYGHGECIKAAICGESDKKFFAKLTSVLNTILQMRNSKTGTELDYLISPVADVNGNFFDSRQAPKNMPQDADANGAYHIGLKGLMLLGRIKNNQEGKKLNLVIKNEEYFEFVQNRNN

SEQ ID NO: 83 - DNA, 518 bp, Artificial Sequence
  about 500 bp digested fragment resulting form Cpf1 digestion of pWD031
aatagtgtatgcggcgaccgagttgctcttgcccggcgtcaatacgggataataccgcgccacatagcagaactttaaaagtgctcatcattggaaaacgttcttcggggcgaaaactctcaaggatcttaccgctgttgagatccagttcgatgtaacccactcgtgcacccaactgatcttcagcatcttttactttcaccagcgtttctgggtgagcaaaaacaggaaggcaaaatgccgcaaaaaagggaataagggcgacacggaaatgttgaatactcatattcttcctttttcaatattattgaagcatttatcagggttattgtctcatgagcggatacatatttgaatgtatttagaaaaataaacaaataggggtcagtgttacaaccaattaaccaattctgaacatggggagagaccgctcttctatgcggctactaatacaaaaggctctagacgaaaaactacgactagctacgccctttcgagaagtcatttaataaggccac

SEQ ID NO: 84 - DNA, 1441 bp, Artificial Sequence
  about 1500 bp digested fragment resulting form Cpf1 digestion of pWD031
gccactgttaaaaggtagaagagcggtctctaaaacagcgctagcggagtgtatactggcttactatgttggcactgatgagggtgtcagtgaagtgcttcatgtggcaggagaaaaaaggctgcaccggtgcgtcagcagaatatgtgatacaggatatattccgcttcctcgctcactgactcgctacgctcggtcgttcgactgcggcgagcggaaatggcttacgaacggggcggagatttcctggaagatgccaggaagatacttaacagggaagtgagagggccgcggcaaagccgtttttccataggctccgcccccctgacaagcatcacgaaatctgacgctcaaatcagtggtggcgaaacccgacaggactataaagataccaggcgtttccccctggcggctccctcgtgcgctctcctgttcctgcctttcggtttaccggtgtcattccgctgttatggccgcgtttgtctcattccacgcctgacactcagttccgggtaggcagttcgctccaagctggactgtatgcacgaaccccccgttcagtccgaccgctgcgccttatccggtaactatcgtcttgagtccaacccggaaagacatgcaaaagcaccactggcagcagccactggtaattgatttagaggagttagtcttgaagtcatgcgccggttaaggctaaactgaaaggacaagttttggtgactgcgctcctccaagccagttacctcggttcaaagagttggtagctcagagaaccttcgaaaaaccgccctgcaaggcggttttttcgttttcagagcaagagattacgcgcagaccaaaacgatctcaagaagatcatcttattaagcttttaccaatgcttaatcagtgaggcacctatctcagcgatctgtctatttcgttcatccatagttgcctgactccccgtcgtgtagataactacgatacgggagggcttaccatctggccccagcgctgcgatgataccgcgagaaccacgctcaccggctccggatttatcagcaataaaccagccagccggaagggccgagcgcagaagtggtcctgcaactttatccgcctccatccagtctattaattgttgccgggaagctagagtaagtagttcgccagttaatagtttgcgcaacgttgttgccatcgctacaggcatcgtggtgtcacgctcgtcgtttggtatggcttcattcagctccggttcccaacgatcaaggcgagttacatgatcccccatgttgtgcaaaaaagcggttagctccttcggtcctccgatcgttgtcagaagtaagttggccgcagtgttatcactcatggttatggcagcactgcataattctcttactgtcatgccatccgtaagatgcttttctgtgactggtgagtactcaaccaagtcatt

SEQ ID NO: 85 - RNA, 37 nt, Artificial Sequence; identical to SEQ ID NO: 31
  cRNA1 targeting pWD031

SEQ ID NO: 86 - DNA, 1304 bp, Artificial Sequence
  PCR product 1 used in Example 3
gcatcgtctcatcggtttcgagaagtcatttaataagggctacgaagtgcacgtcgtggagaagcgtggtgatcctctgcgcgatctgagctcttacgtggacgttgttagcagccgtgcgatcggcgtgagcatgaccgttcgtggtatcaagagcgttttggctgcgggcattccgcgtgcagagctggatgcgtgtggcgaaccgatcgtggcaatggctttctccgtgggtggtcagtatcgcatgcgcgaactgaagccgttggaggatttccgtccgctgagcttgaaccgtgcggcgtttcaaaagctgctgaacaaatacgcgaacctggcaggcgttcgttactactttgagcataagtgcctggatgttgacctggatggtaagagcgtgttgattcagggcaaagatggtcagccgcagcgtctgcaaggtgacatgattatcggtgcggatggcgcccacagcgccgtccgtcaggcgatgcagagcggcctgcgtcgtttcgagttccagcaaacgttcttccgccatggctacaaaaccctggttttgccggacgcgcaagcactgggttaccgtaaagacacgctgtactttttcggcatggattccggtggcctgttcgcgggtcgtgcggctacgatcccagatggtagcgtcagcatcgccgtttgcctgccgtactcgggtagcccttccctgacgaccaccgacgaaccgacgatgcgtgcgttcttcgatcgttacttcggtggcctgccgcgtgacgcgcgtgacgaaatgctgcgtcagtttctggcgaagccgagcaacgacctgattaacgtgcgctctagcacctttcactataagggtaatgtgctgttgctgggtgatgctgcgcatgcgactgcgccgttcctgggtcagggtatgaacatggcgctggaggacgcccgcacgtttgtcgagctgctggaccgccaccagggcgaccaagacaaagcctttccggagttcacggagctgcgcaaagtccaggcagacgcaatgcaagacatggctcgcgccaactatgacgttttgagctgctcgaacccgatctttttcatgcgtgcgcgttacacgcgttacatgcattccaagtttccgggcctgtatccgccggatatggccgagaaactgtactttacgagcgagccgtacgatcgtctgcaacaaatccagcgtaaacagaatgtttggtacaagattggtcgcgtgaattgagtttcaatcatacaaaaggctctagacgaaagacctgagacggcat

SEQ ID NO: 87 - DNA, 1847 bp, Artificial Sequence
  PCR product 2 used in Example 3
gcatcgtctcagacctttcgagaagtcatttaataagcaatcaaacgtgttacaaccaattaaccaattctgattagaaaaactcatcgagcatcaaatgaaactgcaatttattcatatcaggattatcaataccatatttttgaaaaagccgtttctgtaatgaaggagaaaactcaccgaggcagttccataggatggcaagatcctggtatcggtctgcgattccgactcgtccaacatcaatacaacctattaatttcccctcgtcaaaaataaggttatcaagtgagaaatcaccatgagtgacgactgaatccggtgagaatggcaaaagcttatgcatttctttccagacttgttcaacaggccagccattacgctcgtcatcaaaatcactcgcatcaaccaaaccgttattcattcgtgattgcgcctgagcgaggcgaaatacgcgatcgctgttaaaaggacaattacaaacaggaatcgaatgcaaccggcgcaggaacactgccagcgcatcaacaatattttcacctgaatcaggatattcttctaatacctggaatgctgttttcccggggatcgcagtggtgagtaaccatgcatcatcaggagtacggataaaatgcttgatggtcggaagaggcataaattccgtcagccagtttagtctgaccatctcatctgtaacatcattggcaacgctacctttgccatgtttcagaaacaactctggcgcatcgggcttcccatacaatcgatagattgtcgcacctgattgcccgacattatcgcgagcccatttatacccatataaatcagcatccatgttggaatttaatcgcggcctggagcaagacgtttcccgttgaatatggctcataacaccccttgtattactgtttatgtaagcagacagttttattgttcatgatgatatatttttatcttgtgcaatgtaacatcagagattttgagacacaacgtggctttgttgaataaatcgaacttttgctgagttgaaggatcagtcatgaccaaaatcccttaacgtgagttttcgttccactgagcgtcagaccccgtagaaaagatcaaaggatcttcttgagatcctttttttctgcgcgtaatctgctgcttgcaaacaaaaaaaccaccgctaccagcggtggtttgtttgccggatcaagagctaccaactctttttccgaaggtaactggcttcagcagagcgcagataccaaatactgttcttctagtgtagccgtagttaggccaccacttcaagaactctgtagcaccgcctacatacctcgctctgctaatcctgttaccagtggctgctgccagtggcgataagtcgtgtcttaccgggttggactcaagacgatagttaccggataaggcgcagcggtcgggctgaacggggggttcgtgcacacagcccagcttggagcgaacgacctacaccgaactgagatacctacagcgtgagctatgagaaagcgccacgcttcccgaagggagaaaggcggacaggtatccggtaagcggcagggtcggaacaggagagcgcacgagggagcttccagggggaaacgcctggtatctttatagtcctgtcgggtttcgccacctctgacttgagcgtcgatttttgtgatgctcgtcaggggggcggagcctatggaaaaacgccagcaacgcggcctttttacggttcctggccttttgctggccttttgctcacatgttctttcctgcgttatcccctgattctgtggataaccgtgcggtgtgcatacaaaaggctctagacgaaatcggtgagacggcat

SEQ ID NO: 88 - RNA, 37 nt, Artificial Sequence
  cRNA2
aauuucuacuguuguagaugucuagagccuuuuguau

SEQ ID NO: 89 - DNA, 5093 bp, Artificial
  pZHR039 (Kanamycin resistance, GFP)
actacctagctgcattttcaggaggaagcgatgggcggccgcacaccttctatgcggtgtgaaataccgccatgaccaaaatcccttaacgtgagttttcgttccactgagcgtcagaccccgtagaaaagatcaaaggatcttcttgagatcctttttttctgcgcgtaatctgctgcttgcaaacaaaaaaaccaccgctaccagcggtggtttgtttgccggatcaagagctaccaactctttttccgaaggtaactggcttcagcagagcgcagataccaaatactgttcttctagtgtagccgtagttaggccaccacttcaagaactctgtagcaccgcctacatacctcgctctgctaatcctgttaccagtggctgctgccagtggcgataagtcgtgtcttaccgggttggactcaagacgatagttaccggataaggcgcagcggtcgggctgaacggggggttcgtgcacacagcccagcttggagcgaacgacctacaccgaactgagatacctacagcgtgagctatgagaaagcgccacgcttcccgaagggagaaaggcggacaggtatccggtaagcggcagggtcggaacaggagagcgcacgagggagcttccagggggaaacgcctggtatctttatagtcctgtcgggtttcgccacctctgacttgagcgtcgatttttgtgatgctcgtcaggggggcggagcctatggaaaaacgccagcaacgcggcctttttacggttcctggccttttgctggccttttgctcacatgttctttcctgcgttatcccctgattctgtggataaccgtattaccgcctttgagtgagctgataccgctcgccgcagccgaacgaccgagcgcagcgagtcagtgagcgaggaagcggaagagcgcccaatacgcaaaccgcctctccccgcgcgttggccgattcattaatgcagctggcacgacaggtttcccgactggaaagcgggcagtgagcgcaacgcaattaatgtgagttagctcactcattaggcaccccaggctttacactgataatgggtgagtgagtgtgtgcgtgtggggcgcgccagatgggaacagctagcttcacgctgccgcaagcactcagggcgcaagggctgctaaaggaagcggaacacgtagaaagccagtccgcagaaacggtgctgaccccggatgaatgtcagctactgggctatctggacaagggaaaacgcaagcgcaaagagaaagcaggtagcttgcagtgggcttacatggcgatagctagactgggcggttttatggacagcaagcgaaccggaattgccagctggggcgccctctggtaaggttgggaagccctgcaaagtaaactggatggctttcttgccgccaaggatctgatggcgcaggggatcaagatctgatcaagagacaggatgaggatcgtttcgcatgattgaacaagatggattgcacgcaggttctccggccgcttgggtggagaggctattcggctatgactgggcacaacagacaatcggctgctctgatgccgccgtgttccggctgtcagcgcaggggcgcccggttctttttgtcaagaccgacctgtccggtgccctgaatgaactccaagacgaggcagcgcggctatcgtggctggccacgacgggcgttccttgcgcagctgtgctcgacgttgtcactgaagcgggaagggactggctgctattgggcgaagtgccggggcaggatctcctgtcatctcaccttgctcctgccgagaaagtatccatcatggctgatgcaatgcggcggctgcatacgcttgatccggctacctgcccattcgaccaccaagcgaaacatcgcatcgagcgagcacgtactcggatggaagccggtcttgtcgatcaggatgatctggacgaagagcatcaggggctcgcgccagccgaactgttcgccaggctcaaggcgcggatgcccgacggcgaggatctcgtcgtgacccatggcgatgcctgcttgccgaatatcatggtggaaaatggccgcttttctggattcatcgactgtggccggctgggtgtggcggaccgctatcaggacatagcgttggctacccgtgatattgctgaagagcttggcggcgaatgggctgaccgcttcctcgtgctttacggtatcgccgctcccgattcgcagcgcatcgccttctatcgccttcttgacgagttcttctgagcgggactctggggttcgctagaggatcgatcctttttaacccatcacatatacctgccgttcactattatttagtgaaatgagatattatgatattttctgaattgtgattaaaaaggcaactttatgcccatgcaacagaaactataaaaaatacagagaatgaaaagaaacagatagattttttagttctttaggcccgtagtctgcaaatccttttatgattttctatcaaacaaaagaggaaaatagaccagttgcaatccaaacgagagtctaatagaatgaggtcgaaaagtaaatcgcgcgggtttgttactgataaagcaggcaagacctaaaatgtgtaaagggcaaagtgtatactttggcgtcaccccttacatattttaggtctttttttattgtgcgtaactaacttgccatcttcaaacaggagggctggaagaagcagaccgctaacacagtacataaaaaaggagacatgaacgactccagtctttctagaagatggcaaacagctattatgggtattatgggtccccgaagcagggttatgcagcggaaaagctccccgaaaagtgccacctgggtccttttcatcacgtgctataaaaataattataatttaaattttttaatataaatatataaattaaaaatagaaagtaaaaaaagaaattaaagaaaaaatagtttttgttttccgaagatgtaaaagactctagggggatcgccaacaaatactaccttttatcttgctcttcctgctctcaggtattaatgccgaattgtttcatcttgtctgtgtagaagaccacacacgaaaatcctgtgattttacattttacttatcgttaatcgaatgtatatctatttaatctgcttttcttgtctaataaatatatatgtaaagtacgctttttgttgaaattttttaaacctttgtttatttttttttcttcattccgtaactcttctaccttctttatttactttctaaaatccaaatacaaaacataaaaataaataaacacagagtaaattcccaaattattccatcattaaaagatacgaggcgcgtgtaagttacaggcaagcgatccgtcctaagaaaccattattatcatgacattaacctataaaaataggcgtatcacgaggccctttcgtctcgcgcgtttcggtgatgacggtgaaaacctctgacacatgcagctcccggagacggtcacagcttgtctgtaagcggatgccgggagcagacaagcccgtcagggcgcgtcagcgggtgttggcgggtgtcggggctggcttaactatgcggcatcagagcagattgtactgagagtgcaccataccacagccggaagaggagtagggaatattactggctgaaaataagtcttgaatgaacgtatacgcgtatatttctaccaatctctcaacactgagtaatggtagttataagaaagagaccgagttagggacagttagaggcggtggagatattccttatggcatgtctggcgatgataaaacttttcaaacggcagccccgatctaaaagagctgacagggaaatggtcagaaaaagaaacgtgcacccgcccgtctggacgcgccgctcacccgcacggcagagaccaatcagtaaaaatcaacggttaacgacattactatatatataatataggaagcatttaatagaacagcatcgtaatatatgtgtactttgcagttatgacgccagatggcagtagtggaagatattctttattgaaaaatagcttgtcaccttacgtacaatcttgatccggagcttttctttttttgccgattaagaattcggtcgaaaaaagaaaaggagagggccaagagggagggcattggtgactattgagcacgtgagtatacgtgattaagcacacaaaggcagcttggagtatgtctgttattaatttcacaggtagttctggtccattggtgaaagtttgcggcttgcagagcacagaggccgcagaatgtgctctagattccgatgctgacttgctgggtattatatgtgtgcccaatagaaagagaacaattgacccggttattgcaaggaaaatttcaagtcttgtaaaagcatataaaaatagttcaggcactccgaaatacttggttggcgtgtttcgtaatcaacctaaggaggatgttttggctctggtcaatgattacggcattgatatcgtccaactgcatggagatgagtcgtggcaagaataccaagagttcctcggtttgccagttattaaaagactcgtatttccaaaagactgcaacatactactcagtgcagcttcacagaaacctcattcgtttattcccttgtttgattcagaagcaggtgggacaggtgaacttttggattggaactcgatttctgactgggttggaaggcaagagagccccgaaagcttacattttatgttagctggtggactgacgccagaaaatgttggtgatgcgcttagattaaatggcgttattggtgttgatgtaagcggaggtgtggagacaaatggtgtaaaagactctaacaaaatagcaaatttcgtcaaaaatgctaagaaataggttattactgagtagtatttatttaagtattgtttgtgcacttgcctgcaggccttttgaaaagcaagcataaaagatctaaacataaaatctgtaaaataacaagatgtaaagataatgctaaatcatttggctttttgattgattgtacaggactgggtggaatcccttctgcagcacctggattaccctgttatccctagt

SEQ ID NO: 90 - DNA, 13737 bp, Artificial
  13000223370 Cat01 (Chloramphenicol source)
gaatcttatcccatggctaagaaagtagacacctcgaacgctacccccgctctagcccttcttacggagaggcaaattccttttgagctggatgttcatgatgtagatccaaaatcatcaaagggcttcgcattggatgcctctgaagtaatgggtgtggagccggaagtggtgtttaaaacgctcatggcagatattgatggtgaacacgtggtcgcgattgttccagccagcagcacgttgaatctcaagcagttggctaaggctggaaaaggtaagcatgcaaacatgatggatcgcagccgtgcacaggtagtcacggggtatgtccctggtggaatctcaccgatagggcagaagaataagcaccgcgtgtttttggatgagtctgcaattctccaggagcgaatctacgtcagcgcaggacgccgaggctggtcactgattatcgccccggatgatgttcttctggctaccgatggggtttacgcggatattgctgatcattcataaaaggtaaaacccacccccgcaggggtgcgtcgtaaagcaagctccttttcttagtacggcgcgatagtggactcgtgcgcgtcgatgttgatgcggccgtgcacggacgggaatgcgcgctgcgcgcagttctcgcgggtgcacactcggcagccggacccgatgggggtggcggtggataggtcctggaggttgaagccgcgggagtacacggtgcggtcggcgtggcgcgcttcgcagccgagcccgatggcgaacattttgtccacttcgccgaaccgggcttcgtggtgtcgcacggtgcgtgagatccacaggtagttgcgtccgtcgggcatttgcgcgaattggcggagcacttggccggggttggtgaaggtttcaaacacgttccacagggggcaggtgccgccgtagtgggtgaagtggaagccggtggcggattggcgtttggacatgttgccggcgcggtcgacgcgcacgaaggtaaacgggatgccgcgcaggttgggacgctgcagggtggacaggcggtgggcggtcgtctcgtagcccacgccgaaaagctgacctaggtattcgatgtcgtagccggatttttcggcctcggagtggaagattttgtagggcagcattacggcggcggcgaagtaggaggcgacgccgcggatggctagggtgcgggcttcgggggtggaccagatgccgtcgtcgacgatgccttcgatgaggtcgttggcttctaggtagccgagttcggtggccatgcggaaggcgcgttgtccggggttgaggcgtgcgtggattgtcagtaggcgcgtctcggggtcaaagtggtgcagcgtgccggattcctctttggaggaggtgatggtgacatcgtgatccatttgcaggcgcctggcgatcgaatcttccatggcgcgggaatcgtacggctgccagcccagttgcgcggcgatggcttcggcgcggcggtcgagcgcatcgaagtagttttggcgggcgtaaatgaaatcgcgcacctcttcgtgcggcatgctcacggcctccgcgatggggcgacgttcctcaggcgtgttggtgcgattgtccactgcgatggagaacttgtcgcgtacgtttcggtagcgctggtgcatttccaccatggcgcgcgccagctgcgggtggttgtacaccatctccgatagctcttggagctccacgttcgcggggttgatctcccggtccaacatgacatcctgaacttcagctaaaaggcgggaatcatcgtcgcgggagaaaaacgttgcgtctacgccgaacgcctcggtgatgcgcaataacaccggtacggtgagcgggcgtacgtcgtgctcaatctgatttacataactggcagataagccaagggttgctgccaacgacgcctggctcaggtctctttcgcggcgcagttggcgcagcctggaccccacatatgtctttcccatggcgcaactatagcgtgatcaccatcaccttaaccactcttggcattgaggtgttgcaaacctcagaggctaaagaacaagggcttactgtgcgcagaggtgccctcaccggggtcaaaaatttgacatccggtgagggtaataccagcacagcctagtctcgccagaatgctggtcagcatacgaaagagcttaaggcaggccaattcgcactgtcagggtcacttgggtgtttagcactaccgacaggtacgctagtatgcgttcttcctaccagaggtctgtggccgcgtggtcaaaagtgcggctttcgtatttgctgctcgtgtttactctcacacttagctttgacctgcacaaatagttgcaaattgtcccacatacacataaagtagcttgcgtatttaaaattatgaacctaaggggtttagcacttcacgctgccgcaagcactcagggcgcaagggctgctaaaggaagcggaacacgtagaaagccagtccgcagaaacggtgctgaccccggatgaatgtcagctactgggctatctggacaagggaaaacgcaagcgcaaagagaaagcaggtagcttgcagtgggcttacatggcgatagctagactgggcggttttatggacagcaagcgaaccggaattgccagctggggcgccctctggtaaggttgggaagccctgcaaagtaaactggatggctttcttgccgccaaggatctgatggcgcaggggatcaagatctgatcaagagacaggatgaggatcgtttcgcatggagaaaaagatcacgggctacactaccgtggacatctcgcaatggcatcgcaaggaacacttcgaggcatttcaaagcgtggcacaatgtacttacaaccagaccgtccagctggatattaccgcgtttttgaagaccgttaagaaaaacaagcacaagttttatccagcctttatccatattctcgcccgcttgatgaatgcgcaccccgaatttcgtatggccatgaaagatggtgagctcgttatctgggactcagtccatccatgctataccgttttccacgaacaaactgaaactttttcttcgctgtggtccgaatatcacgatgatttccgccaatttttgcatatctacagccaagatgtcgcgtgctatggtgaaaacctggcttactttcccaagggattcatcgagaatatgttctttgtttcagcaaacccctgggtgtccttcacgtcgtttgacttgaacgtggccaatatggataatttcttcgctccagttttcaccatgggtaagtactatacccaaggagacaaggtccttatgccacttgcaatccaagtacaccacgcagtctgcgatggtttccatgtgggacgcatgcttaacgaactccaacagtactgtgatgaatggcaaggcggcgcgtagccccccaaccgaagttgaggggatttttgaatcctcggtcccccttgtccttccagattgatcgacgcgttgttgattttcgcttttcgacgcagcccgccgccatcgggtgcccggcgtggtcaggccacatgcgccccgggaactttttgggcacctacggtgcaacagttgcgaaaattgtgtcacctgcgcaaagccttgcttctattcgggaaattcgggtgtctaaactttttggttgataccaaacggggttagaaactgttcagatcggtatcctgtgaggaagctcaccttggttttagaatgttgaaaaagcctcacgtttccgcaggtagagcacactcaattaaatgagcgtcaaacgacaataaagtaaggctaccctaataactggggttttatgcctctaaacagtcagttgggggcggtaggggagcgtcccatgactggttaatgcctcgatctgggacgtacagtaacagcgacactggaggtgccatgactgttagaaatcccgaccgtgaggcaatccgtcacggaaaaattacgacggaggcgctgcgtgagcgtcccgcatacccgacctgggcaatgaagctgaccatggccatcactggcctaatcttcggtggcttcgttcttgttcacatgatcggaaacctgaaaatcttcatgccggactacgcagccgattctgcgcatccgggtgaagcacaagtagatgtctacggcgagttcctgcgtgagatcggatccccgatcctcccacacggctcagtcctctggatcctacgtattatcctgctggtcgcattggttctgcacatctactgtgcattcgcattgaccggccgttctcaccagtcccgcggaaagttccgccgtaccaacctcgttggcggcttcaactccttcgcgacccgctccatgctggtgaccggaatcgttctccttgcgttcattatcttccacatcctcgacctgaccatgggtgttgctccagcagccccaacttcattcgagcacggcgaagtatacgcaaatatggtggcttcctttagccgctggcctgtagcaatttggtacatcattgccaacctggtcctgttcgtccacctgtctcacggcatctggcttgcagtctctgacctgggaatcaccggacgtcgctggagggcaatcctcctcgcagttgcgtacatcgttcctgcactggtcctgatcggcaacatcaccattccgttcgccatcgctgttggctggattgcgtaaaggttaggaagaatttatgagcactcactctgaaaccacccgcccagagttcatccacccagtctcagtcctcccagaggtctcagctggtacggtccttgacgctgctgagccagcaggcgttcccaccaaagatatgtgggaataccaaaaagaccacatgaacctggtctccccactgaaccgacgcaagttccgcgtcctcgtcgttggcaccggcctgtccggtggcgctgcagcagcagccctcggcgaactcggatacgacgtcaaggcgttcacctaccacgacgcacctcgccgtgcgcactccattgctgcacagggtggcgttaactccgcccgcggcaagaaggtagacaacgacggcgcataccgccacgtcaaggacaccgtcaagggcggcgactaccgtggccgcgagtccgactgctggcgtctcgccgtcgagtccgtccgcgtcatcgaccacatgaacgccatcggtgcaccattcgcccgcgaatacggtggcgccttggcaacccgttccttcggtggtgtgcaggtctcccgtacctactacacccgtggacaaaccggacagcagctgcagctctccaccgcatccgcactacagcgccagatccacctcggctccgtagagatcttcacccataacgaaatggttgacgtaattgtcaccgaacgtaatggtgaaaagcgctgcgaaggcctgatcatgcgcaacctgatcaccggcgagctcaccgcacacaccggccatgccgttatcctggcaaccggtggctacggcaacgtgtaccacatgtccaccctggcgaagaactccaacgcctctagggataacagggtaatacgtcgtgactgggaaaaccctggcgttacccaacttaatcgccttgcagcacatccccctttcgccagctggcgtaatagcgaagaggcccgcaccgatcgcccttcccaacagttgcgcagcctgaatggcgaatggcgataagctagcttcacgctgccgcaagcactcagggcgcaagggctgctaaaggaagcggaacacgtagaaagccagtccgcagaaacggtgctgaccccggatgaatgtcagctactgggctatctggacaagggaaaacgcaagcgcaaagagaaagcaggtagcttgcagtgggcttacatggcgatagctagactgggcggttttatggacagcaagcgaaccggaattgccagctggggcgccctctggtaaggttgggaagccctgcaaagtaaactggatggctttcttgccgccaaggatctgatggcgcaggggatcaagatctgatcaagagacaggatgaggatcgtttcgcatgattgaacaagatggattgcacgcaggttctccggccgcttgggtggagaggctattcggctatgactgggcacaacagacaatcggctgctctgatgccgccgtgttccggctgtcagcgcaggggcgcccggttctttttgtcaagaccgacctgtccggtgccctgaatgaactccaagacgaggcagcgcggctatcgtggctggccacgacgggcgttccttgcgcagctgtgctcgacgttgtcactgaagcgggaagggactggctgctattgggcgaagtgccggggcaggatctcctgtcatctcaccttgctcctgccgagaaagtatccatcatggctgatgcaatgcggcggctgcatacgcttgatccggctacctgcccattcgaccaccaagcgaaacatcgcatcgagcgagcacgtactcggatggaagccggtcttgtcgatcaggatgatctggacgaagagcatcaggggctcgcgccagccgaactgttcgccaggctcaaggcgcggatgcccgacggcgaggatctcgtcgtgacccatggcgatgcctgcttgccgaatatcatggtggaaaatggccgcttttctggattcatcgactgtggccggctgggtgtggcggaccgctatcaggacatagcgttggctacccgtgatattgctgaagagcttggcggcgaatgggctgaccgcttcctcgtgctttacggtatcgccgctcccgattcgcagcgcatcgccttctatcgccttcttgacgagttcttctgagcgggactctggggttcgctagaggatcgatcctttttaacccatcacatatacctgccgttcactattatttagtgaaatgagatattatgatattttctgaattgtgattaaaaaggcaactttatgcccatgcaacagaaactataaaaaatacagagaatgaaaagaaacagatagattttttagttctttaggcccgtagtctgcaaatccttttatgattttctatcaaacaaaagaggaaaatagaccagttgcaatccaaacgagagtctaatagaatgaggtcgaaaagtaaatcgcgcgggtttgttactgataaagcaggcaagacctaaaatgtgtaaagggcaaagtgtatactttggcgtcaccccttacatattttaggtctttttttattgtgcgtaactaacttgccatcttcaaacaggagggctggaagaagcagaccgctaacacagtacataaaaaaggagacatgaacgtgagctgtttacaattaatcatcgtgtggtaccatgtgtggaattggaaaggacatgaacatcaaaaagtttgcaaaacaagcaacagtattaacctttactaccgcactgctggcaggaggcgcaactcaagcgtttgcgaaagaaacgaaccaaaagccatataaggaaacatacggcatttcccatattacacgccatgatatgctgcaaatccctgaacagcaaaaaaatgaaaaatatcaagtttctgaatttgattcgtccacaattaaaaatatctcttctgcaaaaggcctggacgtttgggacagctggccattacaaaacgctgacggcactgtcgcaaactatcacggctaccacatcgtctttgcattagccggagatcctaaaaatgcggatgacacatcgatttacatgttctatcaaaaagtcggcgaaacttctattgacagctggaaaaacgctggccgcgtctttaaagacagcgacaaattcgatgcaaatgattctatcctaaaagaccaaacacaagaatggtcaggttcagccacatttacatctgacggaaaaatccgtttattctacactgatttctccggtaaacattacggcaaacaaacactgacaactgcacaagttaacgtatcagcatcagacagctctttgaacatcaacggtgtagaggattataaatcaatctttgacggtgacggaaaaacgtatcaaaatgtacagcagttcatcgatgaaggcaactacagctcaggcgacaaccatacgctgagagatcctcactacgtagaagataaaggccacaaatacttagtatttgaagcaaacactggaactgaagatggctaccaaggcgaagaatctttatttaacaaagcatactatggcaaaagcacatcattcttccgtcaagaaagtcaaaaacttctgcaaagcgataaaaaacgcacggctgagttagcaaacggcgctctcggtatgattgagctaaacgatgattacacactgaaaaaagtgatgaaaccgctgattgcatctaacacagtaacagatgaaattgaacgcgcgaacgtctttaaaatgaacggcaaatggtacctgttcactgactcccgcggatcaaaaatgacgattgacggcattacgtctaacgatatttacatgcttggttatgtttctaattctttaactggcccatacaagccgctgaacaaaactggccttgtgttaaaaatggatcttgatcctaacgatgtaacctttacttactcacacttcgctgtacctcaagcgaaaggaaacaatgtcgtgattacaagctatatgacaaacagaggattctacgcagacaaacaatcaacgtttgcgccgagcttcctgctgaacatcaaaggcaagaaaacatctgttgtcaaagacagcatccttgaacaaggacaattaacagttaacaaataaaaacgcaaaagaaaatgccgatgggtaccgagcgaaatgaccgaccaagcgacgcccaacctgccatcacgagatttcgattccaccgccgccttctatgaaaggttgggcttcggaatcgttttccgggacgccctcgcggacgtgctcatagtccaataactacattgagcgaaatgccaaccacatgtcccatgcttttactaatgtggggtcttagaagaaagcgaccaatttaaggagagttgaatatgtctgaaatccagctgacggaggcatcattgaacgaagcagccgatgctgcaattaaagcgttcgatggagcacaaaacctcgatgaattggctgctctgcgacgagatcacctgggtgatgcggcaccaatccctcaggcacgccgctcgcttggaaccattccaaaagatcagcgtaaggatgccggacgattcgtaaacatggcgctgggccgcgcggaaaagcacttcgcccaggttaaggtggttcttgaagaaaagcgaaacgcagaagtcctggagctggagcgcgtggatgttaccgtccctaccacacgtgaacaagtcggcgcactgcacccaattacgattctcaacgaacagatcgcggacatctttgttggcatgggctgggagatcgcagagggcccggaagttgaagccgaatacttcaatttcgatgcacttaactttctcccagaccacccagcccgcaccctgcaggataccttccacatcgcacctgaaggatcgcgccaagtgttgcgcacccatacctctcctgtccaggttcgcacgatgctgaatcgagaggtacctatctatatcgcctgtcctggtcgcgtcttccgcactgacgaattggatgctacccacacccctgtctttcaccagatcgagggcctggctgtcgacaaaggcctgacaatggctcaccttcgcggaactctggatcacttggctaaagaactgttcggacctgagactaaaacccgcatgcgttcaaactacttcccattttctgagcccagcgcggaagttgatgtctggttcccaaataagaagggcggtgccggctggatcgaatggggcggctgcggcatggtcaacccaaacgtgctccgcgctgtaggcgtcgacccggaagaatacactggattcggcttcggtatgggtattgaacgcaccttgcaattccgaaatggactctcagatatgcgcgatatggtagaaggcgacattcgctttaccctccctttcggcattcaggcttaggcatttttagtacgtgcaataaccactctggtttttccagggtggttttttgatgccctttttggagtcttcaactgagcctcgcagagcaggattcccgttgagcaccgccaggtgcgaataagggacagtgaagaaggaacacccgctcgcgggtgggcctacttcacctatcctgcccggctgacgccgttggatacaccaaggaaagtctacacgaaccctttggcaaaatcctgtatatcgtgcgaaaaaggatggatataccgaaaaaatcgctataatgaccccgaagcagggttatgcagcggaaaagctccccgaaaagtgccacctgggtccttttcatcacgtgctataaaaataattataatttaaattttttaatataaatatataaattaaaaatagaaagtaaaaaaagaaattaaagaaaaaatagtttttgttttccgaagatgtaaaagactctagggggatcgccaacaaatactaccttttatcttgctcttcctgctctcaggtattaatgccgaattgtttcatcttgtctgtgtagaagaccacacacgaaaatcctgtgattttacattttacttatcgttaatcgaatgtatatctatttaatctgcttttcttgtctaataaatatatatgtaaagtacgctttttgttgaaattttttaaacctttgtttatttttttttcttcattccgtaactcttctaccttctttatttactttctaaaatccaaatacaaaacataaaaataaataaacacagagtaaattcccaaattattccatcattaaaagatacgaggcgcgtgtaagttacaggcaagcgatccgtcctaagaaaccattattatcatgacattaacctataaaaataggcgtatcacgaggccctttcgtctcgcgcgtttcggtgatgacggtgaaaacctctgacacatgcagctcccggagacggtcacagcttgtctgtaagcggatgccgggagcagacaagcccgtcagggcgcgtcagcgggtgttggcgggtgtcggggctggcttaactatgcggcatcagagcagattgtactgagagtgcaccataccacagccggaagaggagtagggaatattactggctgaaaataagtcttgaatgaacgtatacgcgtatatttctaccaatctctcaacactgagtaatggtagttataagaaagagaccgagttagggacagttagaggcggtggagatattccttatggcatgtctggcgatgataaaacttttcaaacggcagccccgatctaaaagagctgacagggaaatggtcagaaaaagaaacgtgcacccgcccgtctggacgcgccgctcacccgcacggcagagaccaatcagtaaaaatcaacggttaacgacattactatatatataatataggaagcatttaatagaacagcatcgtaatatatgtgtactttgcagttatgacgccagatggcagtagtggaagatattctttattgaaaaatagcttgtcaccttacgtacaatcttgatccggagcttttctttttttgccgattaagaattcggtcgaaaaaagaaaaggagagggccaagagggagggcattggtgactattgagcacgtgagtatacgtgattaagcacacaaaggcagcttggagtatgtctgttattaatttcacaggtagttctggtccattggtgaaagtttgcggcttgcagagcacagaggccgcagaatgtgctctagattccgatgctgacttgctgggtattatatgtgtgcccaatagaaagagaacaattgacccggttattgcaaggaaaatttcaagtcttgtaaaagcatataaaaatagttcaggcactccgaaatacttggttggcgtgtttcgtaatcaacctaaggaggatgttttggctctggtcaatgattacggcattgatatcgtccaactgcatggagatgagtcgtggcaagaataccaagagttcctcggtttgccagttattaaaagactcgtatttccaaaagactgcaacatactactcagtgcagcttcacagaaacctcattcgtttattcccttgtttgattcagaagcaggtgggacaggtgaacttttggattggaactcgatttctgactgggttggaaggcaagagagccccgaaagcttacattttatgttagctggtggactgacgccagaaaatgttggtgatgcgcttagattaaatggcgttattggtgttgatgtaagcggaggtgtggagacaaatggtgtaaaagactctaacaaaatagcaaatttcgtcaaaaatgctaagaaataggttattactgagtagtatttatttaagtattgtttgtgcacttgcctgcaggccttttgaaaagcaagcataaaagatctaaacataaaatctgtaaaataacaagatgtaaagataatgctaaatcatttggctttttgattgattgtacaggtatgcggtgtgaaataccgccatgaccaaaatcccttaacgtgagttttcgttccactgagcgtcagaccccgtagaaaagatcaaaggatcttcttgagatcctttttttctgcgcgtaatctgctgcttgcaaacaaaaaaaccaccgctaccagcggtggtttgtttgccggatcaagagctaccaactctttttccgaaggtaactggcttcagcagagcgcagataccaaatactgttcttctagtgtagccgtagttaggccaccacttcaagaactctgtagcaccgcctacatacctcgctctgctaatcctgttaccagtggctgctgccagtggcgataagtcgtgtcttaccgggttggactcaagacgatagttaccggataaggcgcagcggtcgggctgaacggggggttcgtgcacacagcccagcttggagcgaacgacctacaccgaactgagatacctacagcgtgagctatgagaaagcgccacgcttcccgaagggagaaaggcggacaggtatccggtaagcggcagggtcggaacaggagagcgcacgagggagcttccagggggaaacgcctggtatctttatagtcctgtcgggtttcgccacctctgacttgagcgtcgatttttgtgatgctcgtcaggggggcggagcctatggaaaaacgccagcaacgcggcctttttacggttcctggccttttgctggccttttgctcacatgttctttcctgcgttatcccctgattctgtggataaccgtattaccgcctttgagtgagctgataccgctcgccgcagccgaacgaccgagcgcagcgagtcagtgagcgaggaagcggaagagcgcccaatacgcaaaccgcctctccccgcgcgttggccgattcattaatgcagctggcacgacaggtttcccgactggaaagcgggcagtgagcgcaacgcaattaatgtgagttagctcactcattaggcaccccaggctttacactttatgcttccggctcgtatgttgtgtggaattgtgagcggataacaatttaactataacggtcctaaggtagcgaa

SEQ ID NO: 91 - DNA, 6351 bp, Artificial
  pJDI427 GFP Cpf1 KanR AB
ttgagatcctttttttctgcgcgtaatctgctgcttgcaaacaaaaaaaccaccgctaccagcggtggtttgtttgccggatcaagagctaccaactctttttccgaaggtaactggcttcagcagagcgcagataccaaatactgttcttctagtgtagccgtagttaggccaccacttcaagaactctgtagcaccgcctacatacctcgctctgctaatcctgttaccagtggctgctgccagtggcgataagtcgtgtcttaccgggttggactcaagacgatagttaccggataaggcgcagcggtcgggctgaacggggggttcgtgcacacagcccagcttggagcgaacgacctacaccgaactgagatacctacagcgtgagctatgagaaagcgccacgcttcccgaagggagaaaggcggacaggtatccggtaagcggcagggtcggaacaggagagcgcacgagggagcttccagggggaaacgcctggtatctttatagtcctgtcgggtttcgccacctctgacttgagcgtcgatttttgtgatgctcgtcaggggggcggagcctatggaaaaacgccagcaacgcggcctttttacggttcctggccttttgctggccttttgctcacatgttctttcctgcgttatcccctgattctgtggataaccgtattaccgcctttgagtgagctgataccgctcgccgcagccgaacgaccgagcgcagcgagtcagtgagcgaggaagcggaagagcgcccaatacgcaaaccgcctctccccgcgcgttggccgattcattaatgcagctggcacgacaggtttcccgactggaaagcgggcagtgagcgcaacgcaattaatgtgagttagctcactcattaggcaccccaggctttacactgataatgggtgagtgagtgtgtgcgtgtggggcgcgccagatgggaacagctagcttcacgctgccgcaagcactcagggcgcaagggctgctaaaggaagcggaacacgtagaaagccagtccgcagaaacggtgctgaccccggatgaatgtcagctactgggctatctggacaagggaaaacgcaagcgcaaagagaaagcaggtagcttgcagtgggcttacatggcgatagctagactgggcggttttatggacagcaagcgaaccggaattgccagctggggcgccctctggtaaggttgggaagccctgcaaagtaaactggatggctttcttgccgccaaggatctgatggcgcaggggatcaagatctgatcaagagacaggatgaggatcgtttcgcatgattgaacaagatggattgcacgcaggttctccggccgcttgggtggagaggctattcggctatgactgggcacaacagacaatcggctgctctgatgccgccgtgttccggctgtcagcgcaggggcgcccggttctttttgtcaagaccgacctgtccggtgccctgaatgaactccaagacgaggcagcgcggctatcgtggctggccacgacgggcgttccttgcgcagctgtgctcgacgttgtcactgaagcgggaagggactggctgctattgggcgaagtgccggggcaggatctcctgtcatctcaccttgctcctgccgagaaagtatccatcatggctgatgcaatgcggcggctgcatacgcttgatccggctacctgcccattcgaccaccaagcgaaacatcgcatcgagcgagcacgtactcggatggaagccggtcttgtcgatcaggatgatctggacgaagagcatcaggggctcgcgccagccgaactgttcgccaggctcaaggcgcggatgcccgacggcgaggatctcgtcgtgacccatggcgatgcctgcttgccgaatatcatggtggaaaatggccgcttttctggattcatcgactgtggccggctgggtgtggcggaccgctatcaggacatagcgttggctacccgtgatattgctgaagagcttggcggcgaatgggctgaccgcttcctcgtgctttacggtatcgccgctcccgattcgcagcgcatcgccttctatcgccttcttgacgagttcttctgagcgggactctggggttcgctagaggatcgatcctttttaacccatcacatatacctgccgttcactattatttagtgaaatgagatattatgatattttctgaattgtgattaaaaaggcaactttatgcccatgcaacagaaactataaaaaatacagagaatgaaaagaaacagatagattttttagttctttaggcccgtagtctgcaaatccttttatgattttctatcaaacaaaagaggaaaatagaccagttgcaatccaaacgagagtctaatagaatgaggtcgaaaagtaaatcgcgcgggtttgttactgataaagcaggcaagacctaaaatgtgtaaagggcaaagtgtatactttggcgtcaccccttacatattttaggtctttttttattgtgcgtaactaacttgccatcttcaaacaggagggctggaagaagcagaccgctaacacagtacataaaaaaggagacatgaacgactccagtctttctagaagatggcaaacagctattatgggtattatgggtccccgaagcagggttatgcagcggaaaagctccccgaaaagtgccacctgggtccttttcatcacgtgctataaaaataattataatttaaattttttaatataaatatataaattaaaaatagaaagtaaaaaaagaaattaaagaaaaaatagtttttgttttccgaagatgtaaaagactctagggggatcgccaacaaatactaccttttatcttgctcttcctgctctcaggtattaatgccgaattgtttcatcttgtctgtgtagaagaccacacacgaaaatcctgtgattttacattttacttatcgttaatcgaatgtatatctatttaatctgcttttcttgtctaataaatatatatgtaaagtacgctttttgttgaaattttttaaacctttgtttatttttttttcttcattccgtaactcttctaccttctttatttactttctaaaatccaaatacaaaacataaaaataaataaacacagagtaaattcccaaattattccatcattaaaagatacgaggcgcgtgtaagttacaggcaagcgatccgtcctaagaaaccattattatcatgacattaacctataaaaataggcgtatcacgaggccctttcgtctcgcgcgtttcggtgatgacggtgaaaacctctgacacatgcagctcccggagacggtcacagcttgtctgtaagcggatgccgggagcagacaagcccgtcagggcgcgtcagcgggtgttggcgggtgtcggggctggcttaactatgcggcatcagagcagattgtactgagagtgcaccataccacagccggaagaggagtagggaatattactggctgaaaataagtcttgaatgaacgtatacgcgtatatttctaccaatctctcaacactgagtaatggtagttataagaaagagaccgagttagggacagttagaggcggtggagatattccttatggcatgtctggcgatgataaaacttttcaaacggcagccccgatctaaaagagctgacagggaaatggtcagaaaaagaaacgtgcacccgcccgtctggacgcgccgctcacccgcacggcagagaccaatcagtaaaaatcaacggttaacgacattactatatatataatataggaagcatttaatagaacagcatcgtaatatatgtgtactttgcagttatgacgccagatggcagtagtggaagatattctttattgaaaaatagcttgtcaccttacgtacaatcttgatccggagcttttctttttttgccgattaagaattcggtcgaaaaaagaaaaggagagggccaagagggagggcattggtgactattgagcacgtgagtatacgtgattaagcacacaaaggcagcttggagtatgtctgttattaatttcacaggtagttctggtccattggtgaaagtttgcggcttgcagagcacagaggccgcagaatgtgctctagattccgatgctgacttgctgggtattatatgtgtgcccaatagaaagagaacaattgacccggttattgcaaggaaaatttcaagtcttgtaaaagcatataaaaatagttcaggcactccgaaatacttggttggcgtgtttcgtaatcaacctaaggaggatgttttggctctggtcaatgattacggcattgatatcgtccaactgcatggagatgagtcgtggcaagaataccaagagttcctcggtttgccagttattaaaagactcgtatttccaaaagactgcaacatactactcagtgcagcttcacagaaacctcattcgtttattcccttgtttgattcagaagcaggtgggacaggtgaacttttggattggaactcgatttctgactgggttggaaggcaagagagccccgaaagcttacattttatgttagctggtggactgacgccagaaaatgttggtgatgcgcttagattaaatggcgttattggtgttgatgtaagcggaggtgtggagacaaatggtgtaaaagactctaacaaaatagcaaatttcgtcaaaaatgctaagaaataggttattactgagtagtatttatttaagtattgtttgtgcacttgcctgcaggccttttgaaaagcaagcataaaagatctaaacataaaatctgtaaaataacaagatgtaaagataatgctaaatcatttggctttttgattgattgtacaggactgggtggaatcccttctgcagcacctggattaccctgttatccctagttttgggttaaagatggttaaatgattcgaaaataataaagggaaaatcagtttttgatatcaaaattatacatgtcaacgataatacaaaatataatacaaactataagatgttatcagtatttattatgcatttagaataaattttgtgtcgcccttaattgtgagcggataacaattacgagcttcatgcacagtgaaatcatgaaaaatttatttgctttgtgagcggataacaattataatatgtggaattgtgagcgctcacaattccacaacggtttccctctagaaataattttgtttaacttttcgagaccttaggaggtaaacatatgacggcattgacggaaggtgcaaaactgtttgagaaagagatcccgtatatcaccgaactggaaggcgacgtcgaaggtatgaaatttatcattaaaggcgagggtaccggtgacgcgaccacgggtaccattaaagcgaaatacatctgcactacgggcgacctgccggtcccgtgggcaaccctggtgagcaccctgagctacggtgttcagtgtttcgccaagtacccgagccacatcaaggatttctttaagagcgccatgccggaaggttatacccaagagcgtaccatcagcttcgaaggcgacggcgtgtacaagacgcgtgctatggttacctacgaacgcggttctatctacaatcgtgtcacgctgactggtgagaactttaagaaagacggtcacattctgcgtaagaacgttgcattccaatgcccgccaagcattctgtatattctgcctgacaccgttaacaatggcatccgcgttgagttcaaccaggcgtacgatattgaaggtgtgaccgaaaaactggttaccaaatgcagccaaatgaatcgtccgttggcgggctccgcggcagtgcatatcccgcgttatcatcacattacctaccacaccaaactgagcaaagaccgcgacgagcgccgtgatcacatgtgtctggtagaggtcgtgaaagcggttgatctggacacgtatcagtaatgagaattctgtacactcgagggtctcaccccaagggcgacaccccctaattagcccgggcgaaaggcccagtctttcgactgagcctttcgttttatttgatgcctggcagttccctactctcgcatggggagtccccacactaccatcggcgctacggcgtttcacttctgagttcggcatgtcgaagatagggactcttaacatcccaaaactacctagctgcattttcaggaggaagcgatgggcggccgcacaccttctatgcggtgtgaaataccgccatgaccaaaatcccttaacgtgagttttcgttccactgagcgtcagaccccgtagaaaagatcaaaggatcttc

SEQ ID NO: 92 - DNA, 6351 bp, Artificial
  pJDI429 GFP KanR BC
ttgagatcctttttttctgcgcgtaatctgctgcttgcaaacaaaaaaaccaccgctaccagcggtggtttgtttgccggatcaagagctaccaactctttttccgaaggtaactggcttcagcagagcgcagataccaaatactgttcttctagtgtagccgtagttaggccaccacttcaagaactctgtagcaccgcctacatacctcgctctgctaatcctgttaccagtggctgctgccagtggcgataagtcgtgtcttaccgggttggactcaagacgatagttaccggataaggcgcagcggtcgggctgaacggggggttcgtgcacacagcccagcttggagcgaacgacctacaccgaactgagatacctacagcgtgagctatgagaaagcgccacgcttcccgaagggagaaaggcggacaggtatccggtaagcggcagggtcggaacaggagagcgcacgagggagcttccagggggaaacgcctggtatctttatagtcctgtcgggtttcgccacctctgacttgagcgtcgatttttgtgatgctcgtcaggggggcggagcctatggaaaaacgccagcaacgcggcctttttacggttcctggccttttgctggccttttgctcacatgttctttcctgcgttatcccctgattctgtggataaccgtattaccgcctttgagtgagctgataccgctcgccgcagccgaacgaccgagcgcagcgagtcagtgagcgaggaagcggaagagcgcccaatacgcaaaccgcctctccccgcgcgttggccgattcattaatgcagctggcacgacaggtttcccgactggaaagcgggcagtgagcgcaacgcaattaatgtgagttagctcactcattaggcaccccaggctttacactgataatgggtgagtgagtgtgtgcgtgtggggcgcgccagatgggaacagctagcttcacgctgccgcaagcactcagggcgcaagggctgctaaaggaagcggaacacgtagaaagccagtccgcagaaacggtgctgaccccggatgaatgtcagctactgggctatctggacaagggaaaacgcaagcgcaaagagaaagcaggtagcttgcagtgggcttacatggcgatagctagactgggcggttttatggacagcaagcgaaccggaattgccagctggggcgccctctggtaaggttgggaagccctgcaaagtaaactggatggctttcttgccgccaaggatctgatggcgcaggggatcaagatctgatcaagagacaggatgaggatcgtttcgcatgattgaacaagatggattgcacgcaggttctccggccgcttgggtggagaggctattcggctatgactgggcacaacagacaatcggctgctctgatgccgccgtgttccggctgtcagcgcaggggcgcccggttctttttgtcaagaccgacctgtccggtgccctgaatgaactccaagacgaggcagcgcggctatcgtggctggccacgacgggcgttccttgcgcagctgtgctcgacgttgtcactgaagcgggaagggactggctgctattgggcgaagtgccggggcaggatctcctgtcatctcaccttgctcctgccgagaaagtatccatcatggctgatgcaatgcggcggctgcatacgcttgatccggctacctgcccattcgaccaccaagcgaaacatcgcatcgagcgagcacgtactcggatggaagccggtcttgtcgatcaggatgatctggacgaagagcatcaggggctcgcgccagccgaactgttcgccaggctcaaggcgcggatgcccgacggcgaggatctcgtcgtgacccatggcgatgcctgcttgccgaatatcatggtggaaaatggccgcttttctggattcatcgactgtggccggctgggtgtggcggaccgctatcaggacatagcgttggctacccgtgatattgctgaagagcttggcggcgaatgggctgaccgcttcctcgtgctttacggtatcgccgctcccgattcgcagcgcatcgccttctatcgccttcttgacgagttcttctgagcgggactctggggttcgctagaggatcgatcctttttaacccatcacatatacctgccgttcactattatttagtgaaatgagatattatgatattttctgaattgtgattaaaaaggcaactttatgcccatgcaacagaaactataaaaaatacagagaatgaaaagaaacagatagattttttagttctttaggcccgtagtctgcaaatccttttatgattttctatcaaacaaaagaggaaaatagaccagttgcaatccaaacgagagtctaatagaatgaggtcgaaaagtaaatcgcgcgggtttgttactgataaagcaggcaagacctaaaatgtgtaaagggcaaagtgtatactttggcgtcaccccttacatattttaggtctttttttattgtgcgtaactaacttgccatcttcaaacaggagggctggaagaagcagaccgctaacacagtacataaaaaaggagacatgaacgactccagtctttctagaagatggcaaacagctattatgggtattatgggtccccgaagcagggttatgcagcggaaaagctccccgaaaagtgccacctgggtccttttcatcacgtgctataaaaataattataatttaaattttttaatataaatatataaattaaaaatagaaagtaaaaaaagaaattaaagaaaaaatagtttttgttttccgaagatgtaaaagactctagggggatcgccaacaaatactaccttttatcttgctcttcctgctctcaggtattaatgccgaattgtttcatcttgtctgtgtagaagaccacacacgaaaatcctgtgattttacattttacttatcgttaatcgaatgtatatctatttaatctgcttttcttgtctaataaatatatatgtaaagtacgctttttgttgaaattttttaaacctttgtttatttttttttcttcattccgtaactcttctaccttctttatttactttctaaaatccaaatacaaaacataaaaataaataaacacagagtaaattcccaaattattccatcattaaaagatacgaggcgcgtgtaagttacaggcaagcgatccgtcctaagaaaccattattatcatgacattaacctataaaaataggcgtatcacgaggccctttcgtctcgcgcgtttcggtgatgacggtgaaaacctctgacacatgcagctcccggagacggtcacagcttgtctgtaagcggatgccgggagcagacaagcccgtcagggcgcgtcagcgggtgttggcgggtgtcggggctggcttaactatgcggcatcagagcagattgtactgagagtgcaccataccacagccggaagaggagtagggaatattactggctgaaaataagtcttgaatgaacgtatacgcgtatatttctaccaatctctcaacactgagtaatggtagttataagaaagagaccgagttagggacagttagaggcggtggagatattccttatggcatgtctggcgatgataaaacttttcaaacggcagccccgatctaaaagagctgacagggaaatggtcagaaaaagaaacgtgcacccgcccgtctggacgcgccgctcacccgcacggcagagaccaatcagtaaaaatcaacggttaacgacattactatatatataatataggaagcatttaatagaacagcatcgtaatatatgtgtactttgcagttatgacgccagatggcagtagtggaagatattctttattgaaaaatagcttgtcaccttacgtacaatcttgatccggagcttttctttttttgccgattaagaattcggtcgaaaaaagaaaaggagagggccaagagggagggcattggtgactattgagcacgtgagtatacgtgattaagcacacaaaggcagcttggagtatgtctgttattaatttcacaggtagttctggtccattggtgaaagtttgcggcttgcagagcacagaggccgcagaatgtgctctagattccgatgctgacttgctgggtattatatgtgtgcccaatagaaagagaacaattgacccggttattgcaaggaaaatttcaagtcttgtaaaagcatataaaaatagttcaggcactccgaaatacttggttggcgtgtttcgtaatcaacctaaggaggatgttttggctctggtcaatgattacggcattgatatcgtccaactgcatggagatgagtcgtggcaagaataccaagagttcctcggtttgccagttattaaaagactcgtatttccaaaagactgcaacatactactcagtgcagcttcacagaaacctcattcgtttattcccttgtttgattcagaagcaggtgggacaggtgaacttttggattggaactcgatttctgactgggttggaaggcaagagagccccgaaagcttacattttatgttagctggtggactgacgccagaaaatgttggtgatgcgcttagattaaatggcgttattggtgttgatgtaagcggaggtgtggagacaaatggtgtaaaagactctaacaaaatagcaaatttcgtcaaaaatgctaagaaataggttattactgagtagtatttatttaagtattgtttgtgcacttgcctgcaggccttttgaaaagcaagcataaaagatctaaacataaaatctgtaaaataacaagatgtaaagataatgctaaatcatttggctttttgattgattgtacaggactgggtggaatcccttctgcagcacctggattaccctgttatccctagttttgggatgttaagagtccctatcttcgaaaataataaagggaaaatcagtttttgatatcaaaattatacatgtcaacgataatacaaaatataatacaaactataagatgttatcagtatttattatgcatttagaataaattttgtgtcgcccttaattgtgagcggataacaattacgagcttcatgcacagtgaaatcatgaaaaatttatttgctttgtgagcggataacaattataatatgtggaattgtgagcgctcacaattccacaacggtttccctctagaaataattttgtttaacttttcgagaccttaggaggtaaacatatgacggcattgacggaaggtgcaaaactgtttgagaaagagatcccgtatatcaccgaactggaaggcgacgtcgaaggtatgaaatttatcattaaaggcgagggtaccggtgacgcgaccacgggtaccattaaagcgaaatacatctgcactacgggcgacctgccggtcccgtgggcaaccctggtgagcaccctgagctacggtgttcagtgtttcgccaagtacccgagccacatcaaggatttctttaagagcgccatgccggaaggttatacccaagagcgtaccatcagcttcgaaggcgacggcgtgtacaagacgcgtgctatggttacctacgaacgcggttctatctacaatcgtgtcacgctgactggtgagaactttaagaaagacggtcacattctgcgtaagaacgttgcattccaatgcccgccaagcattctgtatattctgcctgacaccgttaacaatggcatccgcgttgagttcaaccaggcgtacgatattgaaggtgtgaccgaaaaactggttaccaaatgcagccaaatgaatcgtccgttggcgggctccgcggcagtgcatatcccgcgttatcatcacattacctaccacaccaaactgagcaaagaccgcgacgagcgccgtgatcacatgtgtctggtagaggtcgtgaaagcggttgatctggacacgtatcagtaatgagaattctgtacactcgagggtctcaccccaagggcgacaccccctaattagcccgggcgaaaggcccagtctttcgactgagcctttcgttttatttgatgcctggcagttccctactctcgcatggggagtccccacactaccatcggcgctacggcgtttcacttctgagttcggcatgtcgattggggtatggggggggcggtcaaaactacctagctgcattttcaggaggaagcgatgggcggccgcacaccttctatgcggtgtgaaataccgccatgaccaaaatcccttaacgtgagttttcgttccactgagcgtcagaccccgtagaaaagatcaaaggatcttc

SEQ ID NO: 93 - DNA, 6353 bp, Artificial
  pJDI430 GFP KanR DB
ttgagatcctttttttctgcgcgtaatctgctgcttgcaaacaaaaaaaccaccgctaccagcggtggtttgtttgccggatcaagagctaccaactctttttccgaaggtaactggcttcagcagagcgcagataccaaatactgttcttctagtgtagccgtagttaggccaccacttcaagaactctgtagcaccgcctacatacctcgctctgctaatcctgttaccagtggctgctgccagtggcgataagtcgtgtcttaccgggttggactcaagacgatagttaccggataaggcgcagcggtcgggctgaacggggggttcgtgcacacagcccagcttggagcgaacgacctacaccgaactgagatacctacagcgtgagctatgagaaagcgccacgcttcccgaagggagaaaggcggacaggtatccggtaagcggcagggtcggaacaggagagcgcacgagggagcttccagggggaaacgcctggtatctttatagtcctgtcgggtttcgccacctctgacttgagcgtcgatttttgtgatgctcgtcaggggggcggagcctatggaaaaacgccagcaacgcggcctttttacggttcctggccttttgctggccttttgctcacatgttctttcctgcgttatcccctgattctgtggataaccgtattaccgcctttgagtgagctgataccgctcgccgcagccgaacgaccgagcgcagcgagtcagtgagcgaggaagcggaagagcgcccaatacgcaaaccgcctctccccgcgcgttggccgattcattaatgcagctggcacgacaggtttcccgactggaaagcgggcagtgagcgcaacgcaattaatgtgagttagctcactcattaggcaccccaggctttacactgataatgggtgagtgagtgtgtgcgtgtggggcgcgccagatgggaacagctagcttcacgctgccgcaagcactcagggcgcaagggctgctaaaggaagcggaacacgtagaaagccagtccgcagaaacggtgctgaccccggatgaatgtcagctactgggctatctggacaagggaaaacgcaagcgcaaagagaaagcaggtagcttgcagtgggcttacatggcgatagctagactgggcggttttatggacagcaagcgaaccggaattgccagctggggcgccctctggtaaggttgggaagccctgcaaagtaaactggatggctttcttgccgccaaggatctgatggcgcaggggatcaagatctgatcaagagacaggatgaggatcgtttcgcatgattgaacaagatggattgcacgcaggttctccggccgcttgggtggagaggctattcggctatgactgggcacaacagacaatcggctgctctgatgccgccgtgttccggctgtcagcgcaggggcgcccggttctttttgtcaagaccgacctgtccggtgccctgaatgaactccaagacgaggcagcgcggctatcgtggctggccacgacgggcgttccttgcgcagctgtgctcgacgttgtcactgaagcgggaagggactggctgctattgggcgaagtgccggggcaggatctcctgtcatctcaccttgctcctgccgagaaagtatccatcatggctgatgcaatgcggcggctgcatacgcttgatccggctacctgcccattcgaccaccaagcgaaacatcgcatcgagcgagcacgtactcggatggaagccggtcttgtcgatcaggatgatctggacgaagagcatcaggggctcgcgccagccgaactgttcgccaggctcaaggcgcggatgcccgacggcgaggatctcgtcgtgacccatggcgatgcctgcttgccgaatatcatggtggaaaatggccgcttttctggattcatcgactgtggccggctgggtgtggcggaccgctatcaggacatagcgttggctacccgtgatattgctgaagagcttggcggcgaatgggctgaccgcttcctcgtgctttacggtatcgccgctcccgattcgcagcgcatcgccttctatcgccttcttgacgagttcttctgagcgggactctggggttcgctagaggatcgatcctttttaacccatcacatatacctgccgttcactattatttagtgaaatgagatattatgatattttctgaattgtgattaaaaaggcaactttatgcccatgcaacagaaactataaaaaatacagagaatgaaaagaaacagatagattttttagttctttaggcccgtagtctgcaaatccttttatgattttctatcaaacaaaagaggaaaatagaccagttgcaatccaaacgagagtctaatagaatgaggtcgaaaagtaaatcgcgcgggtttgttactgataaagcaggcaagacctaaaatgtgtaaagggcaaagtgtatactttggcgtcaccccttacatattttaggtctttttttattgtgcgtaactaacttgccatcttcaaacaggagggctggaagaagcagaccgctaacacagtacataaaaaaggagacatgaacgactccagtctttctagaagatggcaaacagctattatgggtattatgggtccccgaagcagggttatgcagcggaaaagctccccgaaaagtgccacctgggtccttttcatcacgtgctataaaaataattataatttaaattttttaatataaatatataaattaaaaatagaaagtaaaaaaagaaattaaagaaaaaatagtttttgttttccgaagatgtaaaagactctagggggatcgccaacaaatactaccttttatcttgctcttcctgctctcaggtattaatgccgaattgtttcatcttgtctgtgtagaagaccacacacgaaaatcctgtgattttacattttacttatcgttaatcgaatgtatatctatttaatctgcttttcttgtctaataaatatatatgtaaagtacgctttttgttgaaattttttaaacctttgtttatttttttttcttcattccgtaactcttctaccttctttatttactttctaaaatccaaatacaaaacataaaaataaataaacacagagtaaattcccaaattattccatcattaaaagatacgaggcgcgtgtaagttacaggcaagcgatccgtcctaagaaaccattattatcatgacattaacctataaaaataggcgtatcacgaggccctttcgtctcgcgcgtttcggtgatgacggtgaaaacctctgacacatgcagctcccggagacggtcacagcttgtctgtaagcggatgccgggagcagacaagcccgtcagggcgcgtcagcgggtgttggcgggtgtcggggctggcttaactatgcggcatcagagcagattgtactgagagtgcaccataccacagccggaagaggagtagggaatattactggctgaaaataagtcttgaatgaacgtatacgcgtatatttctaccaatctctcaacactgagtaatggtagttataagaaagagaccgagttagggacagttagaggcggtggagatattccttatggcatgtctggcgatgataaaacttttcaaacggcagccccgatctaaaagagctgacagggaaatggtcagaaaaagaaacgtgcacccgcccgtctggacgcgccgctcacccgcacggcagagaccaatcagtaaaaatcaacggttaacgacattactatatatataatataggaagcatttaatagaacagcatcgtaatatatgtgtactttgcagttatgacgccagatggcagtagtggaagatattctttattgaaaaatagcttgtcaccttacgtacaatcttgatccggagcttttctttttttgccgattaagaattcggtcgaaaaaagaaaaggagagggccaagagggagggcattggtgactattgagcacgtgagtatacgtgattaagcacacaaaggcagcttggagtatgtctgttattaatttcacaggtagttctggtccattggtgaaagtttgcggcttgcagagcacagaggccgcagaatgtgctctagattccgatgctgacttgctgggtattatatgtgtgcccaatagaaagagaacaattgacccggttattgcaaggaaaatttcaagtcttgtaaaagcatataaaaatagttcaggcactccgaaatacttggttggcgtgtttcgtaatcaacctaaggaggatgttttggctctggtcaatgattacggcattgatatcgtccaactgcatggagatgagtcgtggcaagaataccaagagttcctcggtttgccagttattaaaagactcgtatttccaaaagactgcaacatactactcagtgcagcttcacagaaacctcattcgtttattcccttgtttgattcagaagcaggtgggacaggtgaacttttggattggaactcgatttctgactgggttggaaggcaagagagccccgaaagcttacattttatgttagctggtggactgacgccagaaaatgttggtgatgcgcttagattaaatggcgttattggtgttgatgtaagcggaggtgtggagacaaatggtgtaaaagactctaacaaaatagcaaatttcgtcaaaaatgctaagaaataggttattactgagtagtatttatttaagtattgtttgtgcacttgcctgcaggccttttgaaaagcaagcataaaagatctaaacataaaatctgtaaaataacaagatgtaaagataatgctaaatcatttggctttttgattgattgtacaggactgggtggaatcccttctgcagcacctggattaccctgttatccctagttttgaggagtgttcagtctccgtgaactcgaaaataataaagggaaaatcagtttttgatatcaaaattatacatgtcaacgataatacaaaatataatacaaactataagatgttatcagtatttattatgcatttagaataaattttgtgtcgcccttaattgtgagcggataacaattacgagcttcatgcacagtgaaatcatgaaaaatttatttgctttgtgagcggataacaattataatatgtggaattgtgagcgctcacaattccacaacggtttccctctagaaataattttgtttaacttttcgagaccttaggaggtaaacatatgacggcattgacggaaggtgcaaaactgtttgagaaagagatcccgtatatcaccgaactggaaggcgacgtcgaaggtatgaaatttatcattaaaggcgagggtaccggtgacgcgaccacgggtaccattaaagcgaaatacatctgcactacgggcgacctgccggtcccgtgggcaaccctggtgagcaccctgagctacggtgttcagtgtttcgccaagtacccgagccacatcaaggatttctttaagagcgccatgccggaaggttatacccaagagcgtaccatcagcttcgaaggcgacggcgtgtacaagacgcgtgctatggttacctacgaacgcggttctatctacaatcgtgtcacgctgactggtgagaactttaagaaagacggtcacattctgcgtaagaacgttgcattccaatgcccgccaagcattctgtatattctgcctgacaccgttaacaatggcatccgcgttgagttcaaccaggcgtacgatattgaaggtgtgaccgaaaaactggttaccaaatgcagccaaatgaatcgtccgttggcgggctccgcggcagtgcatatcccgcgttatcatcacattacctaccacaccaaactgagcaaagaccgcgacgagcgccgtgatcacatgtgtctggtagaggtcgtgaaagcggttgatctggacacgtatcagtaatgagaattctgtacactcgagggtctcaccccaagggcgacaccccctaattagcccgggcgaaaggcccagtctttcgactgagcctttcgttttatttgatgcctggcagttccctactctcgcatggggagtccccacactaccatcggcgctacggcgtttcacttctgagttcggcatgtcgaagatagggactcttaacatcccaaaactacctagctgcattttcaggaggaagcgatgggcggccgcacaccttctatgcggtgtgaaataccgccatgaccaaaatcccttaacgtgagttttcgttccactgagcgtcagaccccgtagaaaagatcaaaggatcttc

SEQ ID NO: 94 - DNA, 6353 bp, Artificial
  pJDI431 KanR GFP DC
ttgagatcctttttttctgcgcgtaatctgctgcttgcaaacaaaaaaaccaccgctaccagcggtggtttgtttgccggatcaagagctaccaactctttttccgaaggtaactggcttcagcagagcgcagataccaaatactgttcttctagtgtagccgtagttaggccaccacttcaagaactctgtagcaccgcctacatacctcgctctgctaatcctgttaccagtggctgctgccagtggcgataagtcgtgtcttaccgggttggactcaagacgatagttaccggataaggcgcagcggtcgggctgaacggggggttcgtgcacacagcccagcttggagcgaacgacctacaccgaactgagatacctacagcgtgagctatgagaaagcgccacgcttcccgaagggagaaaggcggacaggtatccggtaagcggcagggtcggaacaggagagcgcacgagggagcttccagggggaaacgcctggtatctttatagtcctgtcgggtttcgccacctctgacttgagcgtcgatttttgtgatgctcgtcaggggggcggagcctatggaaaaacgccagcaacgcggcctttttacggttcctggccttttgctggccttttgctcacatgttctttcctgcgttatcccctgattctgtggataaccgtattaccgcctttgagtgagctgataccgctcgccgcagccgaacgaccgagcgcagcgagtcagtgagcgaggaagcggaagagcgcccaatacgcaaaccgcctctccccgcgcgttggccgattcattaatgcagctggcacgacaggtttcccgactggaaagcgggcagtgagcgcaacgcaattaatgtgagttagctcactcattaggcaccccaggctttacactgataatgggtgagtgagtgtgtgcgtgtggggcgcgccagatgggaacagctagcttcacgctgccgcaagcactcagggcgcaagggctgctaaaggaagcggaacacgtagaaagccagtccgcagaaacggtgctgaccccggatgaatgtcagctactgggctatctggacaagggaaaacgcaagcgcaaagagaaagcaggtagcttgcagtgggcttacatggcgatagctagactgggcggttttatggacagcaagcgaaccggaattgccagctggggcgccctctggtaaggttgggaagccctgcaaagtaaactggatggctttcttgccgccaaggatctgatggcgcaggggatcaagatctgatcaagagacaggatgaggatcgtttcgcatgattgaacaagatggattgcacgcaggttctccggccgcttgggtggagaggctattcggctatgactgggcacaacagacaatcggctgctctgatgccgccgtgttccggctgtcagcgcaggggcgcccggttctttttgtcaagaccgacctgtccggtgccctgaatgaactccaagacgaggcagcgcggctatcgtggctggccacgacgggcgttccttgcgcagctgtgctcgacgttgtcactgaagcgggaagggactggctgctattgggcgaagtgccggggcaggatctcctgtcatctcaccttgctcctgccgagaaagtatccatcatggctgatgcaatgcggcggctgcatacgcttgatccggctacctgcccattcgaccaccaagcgaaacatcgcatcgagcgagcacgtactcggatggaagccggtcttgtcgatcaggatgatctggacgaagagcatcaggggctcgcgccagccgaactgttcgccaggctcaaggcgcggatgcccgacggcgaggatctcgtcgtgacccatggcgatgcctgcttgccgaatatcatggtggaaaatggccgcttttctggattcatcgactgtggccggctgggtgtggcggaccgctatcaggacatagcgttggctacccgtgatattgctgaagagcttggcggcgaatgggctgaccgcttcctcgtgctttacggtatcgccgctcccgattcgcagcgcatcgccttctatcgccttcttgacgagttcttctgagcgggactctggggttcgctagaggatcgatcctttttaacccatcacatatacctgccgttcactattatttagtgaaatgagatattatgatattttctgaattgtgattaaaaaggcaactttatgcccatgcaacagaaactataaaaaatacagagaatgaaaagaaacagatagattttttagttctttaggcccgtagtctgcaaatccttttatgattttctatcaaacaaaagaggaaaatagaccagttgcaatccaaacgagagtctaatagaatgaggtcgaaaagtaaatcgcgcgggtttgttactgataaagcaggcaagacctaaaatgtgtaaagggcaaagtgtatactttggcgtcaccccttacatattttaggtctttttttattgtgcgtaactaacttgccatcttcaaacaggagggctggaagaagcagaccgctaacacagtacataaaaaaggagacatgaacgactccagtctttctagaagatggcaaacagctattatgggtattatgggtccccgaagcagggttatgcagcggaaaagctccccgaaaagtgccacctgggtccttttcatcacgtgctataaaaataattataatttaaattttttaatataaatatataaattaaaaatagaaagtaaaaaaagaaattaaagaaaaaatagtttttgttttccgaagatgtaaaagactctagggggatcgccaacaaatactaccttttatcttgctcttcctgctctcaggtattaatgccgaattgtttcatcttgtctgtgtagaagaccacacacgaaaatcctgtgattttacattttacttatcgttaatcgaatgtatatctatttaatctgcttttcttgtctaataaatatatatgtaaagtacgctttttgttgaaattttttaaacctttgtttatttttttttcttcattccgtaactcttctaccttctttatttactttctaaaatccaaatacaaaacataaaaataaataaacacagagtaaattcccaaattattccatcattaaaagatacgaggcgcgtgtaagttacaggcaagcgatccgtcctaagaaaccattattatcatgacattaacctataaaaataggcgtatcacgaggccctttcgtctcgcgcgtttcggtgatgacggtgaaaacctctgacacatgcagctcccggagacggtcacagcttgtctgtaagcggatgccgggagcagacaagcccgtcagggcgcgtcagcgggtgttggcgggtgtcggggctggcttaactatgcggcatcagagcagattgtactgagagtgcaccataccacagccggaagaggagtagggaatattactggctgaaaataagtcttgaatgaacgtatacgcgtatatttctaccaatctctcaacactgagtaatggtagttataagaaagagaccgagttagggacagttagaggcggtggagatattccttatggcatgtctggcgatgataaaacttttcaaacggcagccccgatctaaaagagctgacagggaaatggtcagaaaaagaaacgtgcacccgcccgtctggacgcgccgctcacccgcacggcagagaccaatcagtaaaaatcaacggttaacgacattactatatatataatataggaagcatttaatagaacagcatcgtaatatatgtgtactttgcagttatgacgccagatggcagtagtggaagatattctttattgaaaaatagcttgtcaccttacgtacaatcttgatccggagcttttctttttttgccgattaagaattcggtcgaaaaaagaaaaggagagggccaagagggagggcattggtgactattgagcacgtgagtatacgtgattaagcacacaaaggcagcttggagtatgtctgttattaatttcacaggtagttctggtccattggtgaaagtttgcggcttgcagagcacagaggccgcagaatgtgctctagattccgatgctgacttgctgggtattatatgtgtgcccaatagaaagagaacaattgacccggttattgcaaggaaaatttcaagtcttgtaaaagcatataaaaatagttcaggcactccgaaatacttggttggcgtgtttcgtaatcaacctaaggaggatgttttggctctggtcaatgattacggcattgatatcgtccaactgcatggagatgagtcgtggcaagaataccaagagttcctcggtttgccagttattaaaagactcgtatttccaaaagactgcaacatactactcagtgcagcttcacagaaacctcattcgtttattcccttgtttgattcagaagcaggtgggacaggtgaacttttggattggaactcgatttctgactgggttggaaggcaagagagccccgaaagcttacattttatgttagctggtggactgacgccagaaaatgttggtgatgcgcttagattaaatggcgttattggtgttgatgtaagcggaggtgtggagacaaatggtgtaaaagactctaacaaaatagcaaatttcgtcaaaaatgctaagaaataggttattactgagtagtatttatttaagtattgtttgtgcacttgcctgcaggccttttgaaaagcaagcataaaagatctaaacataaaatctgtaaaataacaagatgtaaagataatgctaaatcatttggctttttgattgattgtacaggactgggtggaatcccttctgcagcacctggattaccctgttatccctagttttgaggagtgttcagtctccgtgaactcgaaaataataaagggaaaatcagtttttgatatcaaaattatacatgtcaacgataatacaaaatataatacaaactataagatgttatcagtatttattatgcatttagaataaattttgtgtcgcccttaattgtgagcggataacaattacgagcttcatgcacagtgaaatcatgaaaaatttatttgctttgtgagcggataacaattataatatgtggaattgtgagcgctcacaattccacaacggtttccctctagaaataattttgtttaacttttcgagaccttaggaggtaaacatatgacggcattgacggaaggtgcaaaactgtttgagaaagagatcccgtatatcaccgaactggaaggcgacgtcgaaggtatgaaatttatcattaaaggcgagggtaccggtgacgcgaccacgggtaccattaaagcgaaatacatctgcactacgggcgacctgccggtcccgtgggcaaccctggtgagcaccctgagctacggtgttcagtgtttcgccaagtacccgagccacatcaaggatttctttaagagcgccatgccggaaggttatacccaagagcgtaccatcagcttcgaaggcgacggcgtgtacaagacgcgtgctatggttacctacgaacgcggttctatctacaatcgtgtcacgctgactggtgagaactttaagaaagacggtcacattctgcgtaagaacgttgcattccaatgcccgccaagcattctgtatattctgcctgacaccgttaacaatggcatccgcgttgagttcaaccaggcgtacgatattgaaggtgtgaccgaaaaactggttaccaaatgcagccaaatgaatcgtccgttggcgggctccgcggcagtgcatatcccgcgttatcatcacattacctaccacaccaaactgagcaaagaccgcgacgagcgccgtgatcacatgtgtctggtagaggtcgtgaaagcggttgatctggacacgtatcagtaatgagaattctgtacactcgagggtctcaccccaagggcgacaccccctaattagcccgggcgaaaggcccagtctttcgactgagcctttcgttttatttgatgcctggcagttccctactctcgcatggggagtccccacactaccatcggcgctacggcgtttcacttctgagttcggcatgtcgattggggtatggggggggcggtcaaaactacctagctgcattttcaggaggaagcgatgggcggccgcacaccttctatgcggtgtgaaataccgccatgaccaaaatcccttaacgtgagttttcgttccactgagcgtcagaccccgtagaaaagatcaaaggatcttc

SEQ ID NO: 95 - DNA, 4155 bp, Artificial
  pJDI432 pJET CAT01 AB
gcccctgcagccgaattatattatttttgccaaataatttttaacaaaagctctgaagtcttcttcatttaaattcttagatgatacttcatctggaaaattgtcccaattagtagcatcacgctgtgagtaagttctaaaccatttttttattgttgtattatctctaatcttactactcgatgagttttcggtattatctctatttttaacttggagcaggttccattcattgtttttttcatcatagtgaataaaatcaactgctttaacacttgtgcctgaacaccatatccatccggcgtaatacgactcactatagggagagcggccgccagatcttccggatggctcgagtttttcagcaagattttgggttaaagatggttaaatgattcgacatacacataaagtagcttgcgtatttaaaattatgaacctaaggggtttagcacttcacgctgccgcaagcactcagggcgcaagggctgctaaaggaagcggaacacgtagaaagccagtccgcagaaacggtgctgaccccggatgaatgtcagctactgggctatctggacaagggaaaacgcaagcgcaaagagaaagcaggtagcttgcagtgggcttacatggcgatagctagactgggcggttttatggacagcaagcgaaccggaattgccagctggggcgccctctggtaaggttgggaagccctgcaaagtaaactggatggctttcttgccgccaaggatctgatggcgcaggggatcaagatctgatcaagagacaggatgaggatcgtttcgcatggagaaaaagatcacgggctacactaccgtggacatctcgcaatggcatcgcaaggaacacttcgaggcatttcaaagcgtggcacaatgtacttacaaccagaccgtccagctggatattaccgcgtttttgaagaccgttaagaaaaacaagcacaagttttatccagcctttatccatattctcgcccgcttgatgaatgcgcaccccgaatttcgtatggccatgaaagatggtgagctcgttatctgggactcagtccatccatgctataccgttttccacgaacaaactgaaactttttcttcgctgtggtccgaatatcacgatgatttccgccaatttttgcatatctacagccaagatgtcgcgtgctatggtgaaaacctggcttactttcccaagggattcatcgagaatatgttctttgtttcagcaaacccctgggtgtccttcacgtcgtttgacttgaacgtggccaatatggataatttcttcgctccagttttcaccatgggtaagtactatacccaaggagacaaggtccttatgccacttgcaatccaagtacaccacgcagtctgcgatggtttccatgtgggacgcatgcttaacgaactccaacagtactgtgatgaatggcaaggcggcgcgtagccccccaaccgaagttgaggggatttttgaatcctcggtcccccttgtccttccagtcgaagatagggactcttaacatcccaaaatctttctagaagatctcctacaatattctcagctgccatggaaaatcgatgttcttcttttattctctcaagattttcaggctgtatattaaaacttatattaagaactatgctaaccacctcatcaggaaccgttgtaggtggcgtgggttttcttggcaatcgactctcatgaaaactacgagctaaatattcaatatgttcctcttgaccaactttattctgcattttttttgaacgaggtttagagcaagcttcaggaaactgagacaggaattttattaaaaatttaaattttgaagaaagttcagggttaatagcatccattttttgctttgcaagttcctcagcattcttaacaaaagacgtctcttttgacatgtttaaagtttaaacctcctgtgtgaaattattatccgctcataattccacacattatacgagccggaagcataaagtgtaaagcctggggtgcctaatgagtgagctaactcacattaattgcgttgcgctcactgccaattgctttccagtcgggaaacctgtcgtgccagctgcattaatgaatcggccaacgcgcggggagaggcggtttgcgtattgggcgctcttccgcttcctcgctcactgactcgctgcgctcggtcgttcggctgcggcgagcggtatcagctcactcaaaggcggtaatacggttatccacagaatcaggggataacgcaggaaagaacatgtgagcaaaaggccagcaaaaggccaggaaccgtaaaaaggccgcgttgctggcgtttttccataggctccgcccccctgacgagcatcacaaaaatcgacgctcaagtcagaggtggcgaaacccgacaggactataaagataccaggcgtttccccctggaagctccctcgtgcgctctcctgttccgaccctgccgcttaccggatacctgtccgcctttctcccttcgggaagcgtggcgctttctcatagctcacgctgtaggtatctcagttcggtgtaggtcgttcgctccaagctgggctgtgtgcacgaaccccccgttcagcccgaccgctgcgccttatccggtaactatcgtcttgagtccaacccggtaagacacgacttatcgccactggcagcagccactggtaacaggattagcagagcgaggtatgtaggcggtgctacagagttcttgaagtggtggcctaactacggctacactagaaggacagtatttggtatctgcgctctgctgaagccagttaccttcggaaaaagagttggtagctcttgatccggcaaacaaaccaccgctggtagcggtggtttttttgtttgcaagcagcagattacgcgcagaaaaaaaggatctcaagaagatcctttgatcttttctacggggtctgacgctcagtggaacgaaaactcacgttaagggattttggtcatgagattatcaaaaaggatcttcacctagatccttttaaattaaaaatgaagttttaaatcaatctaaagtatatatgagtaaacttggtctgacagttaccaatgcttaatcagtgaggcacctatctcagcgatctgtctatttcgttcatccatagttgcctgactccccgtcgtgtagataactacgatacgggagggcttaccatctggccccagtgctgcaatgataccgcgagacccacgctcaccggctccagatttatcagcaataaaccagccagccggaagggccgagcgcagaagtggtcctgcaactttatccgcctccatccagtctattaattgttgccgggaagctagagtaagtagttcgccagttaatagtttgcgcaacgttgttgccattgctacaggcatcgtggtgtcacgctcgtcgtttggtatggcttcattcagctccggttcccaacgatcaaggcgagttacatgatcccccatgttgtgcaaaaaagcggttagctccttcggtcctccgatcgttgtcagaagtaagttggccgcagtgttatcactcatggttatggcagcactgcataattctcttactgtcatgccatccgtaagatgcttttctgtgactggtgagtactcaaccaagtcattctgagaatagtgtatgcggcgaccgagttgctcttgcccggcgtcaatacgggataataccgcgccacatagcagaactttaaaagtgctcatcattggaaaacgttcttcggggcgaaaactctcaaggatcttaccgctgttgagatccagttcgatgtaacccactcgtgcacccaactgatcttcagcatcttttactttcaccagcgtttctgggtgagcaaaaacaggaaggcaaaatgccgcaaaaaagggaataagggcgacacggaaatgttgaatactcatactcttcctttttcaatattattgaagcatttatcagggttattgtctcatgagcggatacatatttgaatgtatttagaaaaataaacaaataggggttccgcgcacatttccccgaaaagtgccacctgacgtctaagaaaccattattatcatgacattaacctataaaaataggcgtatcacgaggcc

SEQ ID NO: 96 - DNA, 4155 bp, Artificial
  pJDI434 pJET CAT01 BC
gcccctgcagccgaattatattatttttgccaaataatttttaacaaaagctctgaagtcttcttcatttaaattcttagatgatacttcatctggaaaattgtcccaattagtagcatcacgctgtgagtaagttctaaaccatttttttattgttgtattatctctaatcttactactcgatgagttttcggtattatctctatttttaacttggagcaggttccattcattgtttttttcatcatagtgaataaaatcaactgctttaacacttgtgcctgaacaccatatccatccggcgtaatacgactcactatagggagagcggccgccagatcttccggatggctcgagtttttcagcaagattttgggatgttaagagtccctatcttcgacatacacataaagtagcttgcgtatttaaaattatgaacctaaggggtttagcacttcacgctgccgcaagcactcagggcgcaagggctgctaaaggaagcggaacacgtagaaagccagtccgcagaaacggtgctgaccccggatgaatgtcagctactgggctatctggacaagggaaaacgcaagcgcaaagagaaagcaggtagcttgcagtgggcttacatggcgatagctagactgggcggttttatggacagcaagcgaaccggaattgccagctggggcgccctctggtaaggttgggaagccctgcaaagtaaactggatggctttcttgccgccaaggatctgatggcgcaggggatcaagatctgatcaagagacaggatgaggatcgtttcgcatggagaaaaagatcacgggctacactaccgtggacatctcgcaatggcatcgcaaggaacacttcgaggcatttcaaagcgtggcacaatgtacttacaaccagaccgtccagctggatattaccgcgtttttgaagaccgttaagaaaaacaagcacaagttttatccagcctttatccatattctcgcccgcttgatgaatgcgcaccccgaatttcgtatggccatgaaagatggtgagctcgttatctgggactcagtccatccatgctataccgttttccacgaacaaactgaaactttttcttcgctgtggtccgaatatcacgatgatttccgccaatttttgcatatctacagccaagatgtcgcgtgctatggtgaaaacctggcttactttcccaagggattcatcgagaatatgttctttgtttcagcaaacccctgggtgtccttcacgtcgtttgacttgaacgtggccaatatggataatttcttcgctccagttttcaccatgggtaagtactatacccaaggagacaaggtccttatgccacttgcaatccaagtacaccacgcagtctgcgatggtttccatgtgggacgcatgcttaacgaactccaacagtactgtgatgaatggcaaggcggcgcgtagccccccaaccgaagttgaggggatttttgaatcctcggtcccccttgtccttccagtcgattggggtatggggggggcggtcaaaatctttctagaagatctcctacaatattctcagctgccatggaaaatcgatgttcttcttttattctctcaagattttcaggctgtatattaaaacttatattaagaactatgctaaccacctcatcaggaaccgttgtaggtggcgtgggttttcttggcaatcgactctcatgaaaactacgagctaaatattcaatatgttcctcttgaccaactttattctgcattttttttgaacgaggtttagagcaagcttcaggaaactgagacaggaattttattaaaaatttaaattttgaagaaagttcagggttaatagcatccattttttgctttgcaagttcctcagcattcttaacaaaagacgtctcttttgacatgtttaaagtttaaacctcctgtgtgaaattattatccgctcataattccacacattatacgagccggaagcataaagtgtaaagcctggggtgcctaatgagtgagctaactcacattaattgcgttgcgctcactgccaattgctttccagtcgggaaacctgtcgtgccagctgcattaatgaatcggccaacgcgcggggagaggcggtttgcgtattgggcgctcttccgcttcctcgctcactgactcgctgcgctcggtcgttcggctgcggcgagcggtatcagctcactcaaaggcggtaatacggttatccacagaatcaggggataacgcaggaaagaacatgtgagcaaaaggccagcaaaaggccaggaaccgtaaaaaggccgcgttgctggcgtttttccataggctccgcccccctgacgagcatcacaaaaatcgacgctcaagtcagaggtggcgaaacccgacaggactataaagataccaggcgtttccccctggaagctccctcgtgcgctctcctgttccgaccctgccgcttaccggatacctgtccgcctttctcccttcgggaagcgtggcgctttctcatagctcacgctgtaggtatctcagttcggtgtaggtcgttcgctccaagctgggctgtgtgcacgaaccccccgttcagcccgaccgctgcgccttatccggtaactatcgtcttgagtccaacccggtaagacacgacttatcgccactggcagcagccactggtaacaggattagcagagcgaggtatgtaggcggtgctacagagttcttgaagtggtggcctaactacggctacactagaaggacagtatttggtatctgcgctctgctgaagccagttaccttcggaaaaagagttggtagctcttgatccggcaaacaaaccaccgctggtagcggtggtttttttgtttgcaagcagcagattacgcgcagaaaaaaaggatctcaagaagatcctttgatcttttctacggggtctgacgctcagtggaacgaaaactcacgttaagggattttggtcatgagattatcaaaaaggatcttcacctagatccttttaaattaaaaatgaagttttaaatcaatctaaagtatatatgagtaaacttggtctgacagttaccaatgcttaatcagtgaggcacctatctcagcgatctgtctatttcgttcatccatagttgcctgactccccgtcgtgtagataactacgatacgggagggcttaccatctggccccagtgctgcaatgataccgcgagacccacgctcaccggctccagatttatcagcaataaaccagccagccggaagggccgagcgcagaagtggtcctgcaactttatccgcctccatccagtctattaattgttgccgggaagctagagtaagtagttcgccagttaatagtttgcgcaacgttgttgccattgctacaggcatcgtggtgtcacgctcgtcgtttggtatggcttcattcagctccggttcccaacgatcaaggcgagttacatgatcccccatgttgtgcaaaaaagcggttagctccttcggtcctccgatcgttgtcagaagtaagttggccgcagtgttatcactcatggttatggcagcactgcataattctcttactgtcatgccatccgtaagatgcttttctgtgactggtgagtactcaaccaagtcattctgagaatagtgtatgcggcgaccgagttgctcttgcccggcgtcaatacgggataataccgcgccacatagcagaactttaaaagtgctcatcattggaaaacgttcttcggggcgaaaactctcaaggatcttaccgctgttgagatccagttcgatgtaacccactcgtgcacccaactgatcttcagcatcttttactttcaccagcgtttctgggtgagcaaaaacaggaaggcaaaatgccgcaaaaaagggaataagggcgacacggaaatgttgaatactcatactcttcctttttcaatattattgaagcatttatcagggttattgtctcatgagcggatacatatttgaatgtatttagaaaaataaacaaataggggttccgcgcacatttccccgaaaagtgccacctgacgtctaagaaaccattattatcatgacattaacctataaaaataggcgtatcacgaggcc

SEQ ID NO: 97 - DNA, 4157 bp, Artificial
  pJDI435 pJET CAT01 DB
gcccctgcagccgaattatattatttttgccaaataatttttaacaaaagctctgaagtcttcttcatttaaattcttagatgatacttcatctggaaaattgtcccaattagtagcatcacgctgtgagtaagttctaaaccatttttttattgttgtattatctctaatcttactactcgatgagttttcggtattatctctatttttaacttggagcaggttccattcattgtttttttcatcatagtgaataaaatcaactgctttaacacttgtgcctgaacaccatatccatccggcgtaatacgactcactatagggagagcggccgccagatcttccggatggctcgagtttttcagcaagattttgaggagtgttcagtctccgtgaactcgacatacacataaagtagcttgcgtatttaaaattatgaacctaaggggtttagcacttcacgctgccgcaagcactcagggcgcaagggctgctaaaggaagcggaacacgtagaaagccagtccgcagaaacggtgctgaccccggatgaatgtcagctactgggctatctggacaagggaaaacgcaagcgcaaagagaaagcaggtagcttgcagtgggcttacatggcgatagctagactgggcggttttatggacagcaagcgaaccggaattgccagctggggcgccctctggtaaggttgggaagccctgcaaagtaaactggatggctttcttgccgccaaggatctgatggcgcaggggatcaagatctgatcaagagacaggatgaggatcgtttcgcatggagaaaaagatcacgggctacactaccgtggacatctcgcaatggcatcgcaaggaacacttcgaggcatttcaaagcgtggcacaatgtacttacaaccagaccgtccagctggatattaccgcgtttttgaagaccgttaagaaaaacaagcacaagttttatccagcctttatccatattctcgcccgcttgatgaatgcgcaccccgaatttcgtatggccatgaaagatggtgagctcgttatctgggactcagtccatccatgctataccgttttccacgaacaaactgaaactttttcttcgctgtggtccgaatatcacgatgatttccgccaatttttgcatatctacagccaagatgtcgcgtgctatggtgaaaacctggcttactttcccaagggattcatcgagaatatgttctttgtttcagcaaacccctgggtgtccttcacgtcgtttgacttgaacgtggccaatatggataatttcttcgctccagttttcaccatgggtaagtactatacccaaggagacaaggtccttatgccacttgcaatccaagtacaccacgcagtctgcgatggtttccatgtgggacgcatgcttaacgaactccaacagtactgtgatgaatggcaaggcggcgcgtagccccccaaccgaagttgaggggatttttgaatcctcggtcccccttgtccttccagtcgaagatagggactcttaacatcccaaaatctttctagaagatctcctacaatattctcagctgccatggaaaatcgatgttcttcttttattctctcaagattttcaggctgtatattaaaacttatattaagaactatgctaaccacctcatcaggaaccgttgtaggtggcgtgggttttcttggcaatcgactctcatgaaaactacgagctaaatattcaatatgttcctcttgaccaactttattctgcattttttttgaacgaggtttagagcaagcttcaggaaactgagacaggaattttattaaaaatttaaattttgaagaaagttcagggttaatagcatccattttttgctttgcaagttcctcagcattcttaacaaaagacgtctcttttgacatgtttaaagtttaaacctcctgtgtgaaattattatccgctcataattccacacattatacgagccggaagcataaagtgtaaagcctggggtgcctaatgagtgagctaactcacattaattgcgttgcgctcactgccaattgctttccagtcgggaaacctgtcgtgccagctgcattaatgaatcggccaacgcgcggggagaggcggtttgcgtattgggcgctcttccgcttcctcgctcactgactcgctgcgctcggtcgttcggctgcggcgagcggtatcagctcactcaaaggcggtaatacggttatccacagaatcaggggataacgcaggaaagaacatgtgagcaaaaggccagcaaaaggccaggaaccgtaaaaaggccgcgttgctggcgtttttccataggctccgcccccctgacgagcatcacaaaaatcgacgctcaagtcagaggtggcgaaacccgacaggactataaagataccaggcgtttccccctggaagctccctcgtgcgctctcctgttccgaccctgccgcttaccggatacctgtccgcctttctcccttcgggaagcgtggcgctttctcatagctcacgctgtaggtatctcagttcggtgtaggtcgttcgctccaagctgggctgtgtgcacgaaccccccgttcagcccgaccgctgcgccttatccggtaactatcgtcttgagtccaacccggtaagacacgacttatcgccactggcagcagccactggtaacaggattagcagagcgaggtatgtaggcggtgctacagagttcttgaagtggtggcctaactacggctacactagaaggacagtatttggtatctgcgctctgctgaagccagttaccttcggaaaaagagttggtagctcttgatccggcaaacaaaccaccgctggtagcggtggtttttttgtttgcaagcagcagattacgcgcagaaaaaaaggatctcaagaagatcctttgatcttttctacggggtctgacgctcagtggaacgaaaactcacgttaagggattttggtcatgagattatcaaaaaggatcttcacctagatccttttaaattaaaaatgaagttttaaatcaatctaaagtatatatgagtaaacttggtctgacagttaccaatgcttaatcagtgaggcacctatctcagcgatctgtctatttcgttcatccatagttgcctgactccccgtcgtgtagataactacgatacgggagggcttaccatctggccccagtgctgcaatgataccgcgagacccacgctcaccggctccagatttatcagcaataaaccagccagccggaagggccgagcgcagaagtggtcctgcaactttatccgcctccatccagtctattaattgttgccgggaagctagagtaagtagttcgccagttaatagtttgcgcaacgttgttgccattgctacaggcatcgtggtgtcacgctcgtcgtttggtatggcttcattcagctccggttcccaacgatcaaggcgagttacatgatcccccatgttgtgcaaaaaagcggttagctccttcggtcctccgatcgttgtcagaagtaagttggccgcagtgttatcactcatggttatggcagcactgcataattctcttactgtcatgccatccgtaagatgcttttctgtgactggtgagtactcaaccaagtcattctgagaatagtgtatgcggcgaccgagttgctcttgcccggcgtcaatacgggataataccgcgccacatagcagaactttaaaagtgctcatcattggaaaacgttcttcggggcgaaaactctcaaggatcttaccgctgttgagatccagttcgatgtaacccactcgtgcacccaactgatcttcagcatcttttactttcaccagcgtttctgggtgagcaaaaacaggaaggcaaaatgccgcaaaaaagggaataagggcgacacggaaatgttgaatactcatactcttcctttttcaatattattgaagcatttatcagggttattgtctcatgagcggatacatatttgaatgtatttagaaaaataaacaaataggggttccgcgcacatttccccgaaaagtgccacctgacgtctaagaaaccattattatcatgacattaacctataaaaataggcgtatcacgaggcc

SEQ ID NO: 98 - DNA, 4159 bp, Artificial
  pJDI436 pJET CAT01 DC
gcccctgcagccgaattatattatttttgccaaataatttttaacaaaagctctgaagtcttcttcatttaaattcttagatgatacttcatctggaaaattgtcccaattagtagcatcacgctgtgagtaagttctaaaccatttttttattgttgtattatctctaatcttactactcgatgagttttcggtattatctctatttttaacttggagcaggttccattcattgtttttttcatcatagtgaataaaatcaactgctttaacacttgtgcctgaacaccatatccatccggcgtaatacgactcactatagggagagcggccgccagatcttccggatggctcgagtttttcagcaagattttgaggagtgttcagtctccgtgaactcgacatacacataaagtagcttgcgtatttaaaattatgaacctaaggggtttagcacttcacgctgccgcaagcactcagggcgcaagggctgctaaaggaagcggaacacgtagaaagccagtccgcagaaacggtgctgaccccggatgaatgtcagctactgggctatctggacaagggaaaacgcaagcgcaaagagaaagcaggtagcttgcagtgggcttacatggcgatagctagactgggcggttttatggacagcaagcgaaccggaattgccagctggggcgccctctggtaaggttgggaagccctgcaaagtaaactggatggctttcttgccgccaaggatctgatggcgcaggggatcaagatctgatcaagagacaggatgaggatcgtttcgcatggagaaaaagatcacgggctacactaccgtggacatctcgcaatggcatcgcaaggaacacttcgaggcatttcaaagcgtggcacaatgtacttacaaccagaccgtccagctggatattaccgcgtttttgaagaccgttaagaaaaacaagcacaagttttatccagcctttatccatattctcgcccgcttgatgaatgcgcaccccgaatttcgtatggccatgaaagatggtgagctcgttatctgggactcagtccatccatgctataccgttttccacgaacaaactgaaactttttcttcgctgtggtccgaatatcacgatgatttccgccaatttttgcatatctacagccaagatgtcgcgtgctatggtgaaaacctggcttactttcccaagggattcatcgagaatatgttctttgtttcagcaaacccctgggtgtccttcacgtcgtttgacttgaacgtggccaatatggataatttcttcgctccagttttcaccatgggtaagtactatacccaaggagacaaggtccttatgccacttgcaatccaagtacaccacgcagtctgcgatggtttccatgtgggacgcatgcttaacgaactccaacagtactgtgatgaatggcaaggcggcgcgtagccccccaaccgaagttgaggggatttttgaatcctcggtcccccttgtccttccagtcgattggggtatggggggggcggtcaaaaaatctttctagaagatctcctacaatattctcagctgccatggaaaatcgatgttcttcttttattctctcaagattttcaggctgtatattaaaacttatattaagaactatgctaaccacctcatcaggaaccgttgtaggtggcgtgggttttcttggcaatcgactctcatgaaaactacgagctaaatattcaatatgttcctcttgaccaactttattctgcattttttttgaacgaggtttagagcaagcttcaggaaactgagacaggaattttattaaaaatttaaattttgaagaaagttcagggttaatagcatccattttttgctttgcaagttcctcagcattcttaacaaaagacgtctcttttgacatgtttaaagtttaaacctcctgtgtgaaattattatccgctcataattccacacattatacgagccggaagcataaagtgtaaagcctggggtgcctaatgagtgagctaactcacattaattgcgttgcgctcactgccaattgctttccagtcgggaaacctgtcgtgccagctgcattaatgaatcggccaacgcgcggggagaggcggtttgcgtattgggcgctcttccgcttcctcgctcactgactcgctgcgctcggtcgttcggctgcggcgagcggtatcagctcactcaaaggcggtaatacggttatccacagaatcaggggataacgcaggaaagaacatgtgagcaaaaggccagcaaaaggccaggaaccgtaaaaaggccgcgttgctggcgtttttccataggctccgcccccctgacgagcatcacaaaaatcgacgctcaagtcagaggtggcgaaacccgacaggactataaagataccaggcgtttccccctggaagctccctcgtgcgctctcctgttccgaccctgccgcttaccggatacctgtccgcctttctcccttcgggaagcgtggcgctttctcatagctcacgctgtaggtatctcagttcggtgtaggtcgttcgctccaagctgggctgtgtgcacgaaccccccgttcagcccgaccgctgcgccttatccggtaactatcgtcttgagtccaacccggtaagacacgacttatcgccactggcagcagccactggtaacaggattagcagagcgaggtatgtaggcggtgctacagagttcttgaagtggtggcctaactacggctacactagaaggacagtatttggtatctgcgctctgctgaagccagttaccttcggaaaaagagttggtagctcttgatccggcaaacaaaccaccgctggtagcggtggtttttttgtttgcaagcagcagattacgcgcagaaaaaaaggatctcaagaagatcctttgatcttttctacggggtctgacgctcagtggaacgaaaactcacgttaagggattttggtcatgagattatcaaaaaggatcttcacctagatccttttaaattaaaaatgaagttttaaatcaatctaaagtatatatgagtaaacttggtctgacagttaccaatgcttaatcagtgaggcacctatctcagcgatctgtctatttcgttcatccatagttgcctgactccccgtcgtgtagataactacgatacgggagggcttaccatctggccccagtgctgcaatgataccgcgagacccacgctcaccggctccagatttatcagcaataaaccagccagccggaagggccgagcgcagaagtggtcctgcaactttatccgcctccatccagtctattaattgttgccgggaagctagagtaagtagttcgccagttaatagtttgcgcaacgttgttgccattgctacaggcatcgtggtgtcacgctcgtcgtttggtatggcttcattcagctccggttcccaacgatcaaggcgagttacatgatcccccatgttgtgcaaaaaagcggttagctccttcggtcctccgatcgttgtcagaagtaagttggccgcagtgttatcactcatggttatggcagcactgcataattctcttactgtcatgccatccgtaagatgcttttctgtgactggtgagtactcaaccaagtcattctgagaatagtgtatgcggcgaccgagttgctcttgcccggcgtcaatacgggataataccgcgccacatagcagaactttaaaagtgctcatcattggaaaacgttcttcggggcgaaaactctcaaggatcttaccgctgttgagatccagttcgatgtaacccactcgtgcacccaactgatcttcagcatcttttactttcaccagcgtttctgggtgagcaaaaacaggaaggcaaaatgccgcaaaaaagggaataagggcgacacggaaatgttgaatactcatactcttcctttttcaatattattgaagcatttatcagggttattgtctcatgagcggatacatatttgaatgtatttagaaaaataaacaaataggggttccgcgcacatttccccgaaaagtgccacctgacgtctaagaaaccattattatcatgacattaacctataaaaataggcgtatcacgaggcc

SEQ ID NO: 99 - DNA, 79 bp, Artificial
  GFP Cpf1 A fwd
cagcacctggattaccctgttatccctagttttgggttaaagatggttaaatgattcgaaaataataaagggaaaatca

SEQ ID NO: 100 - DNA, 79 bp, Artificial
  GFP Cpf1 B fwd
cagcacctggattaccctgttatccctagttttgggatgttaagagtccctatcttcgaaaataataaagggaaaatca

SEQ ID NO: 101 - DNA, 81 bp, Artificial
  GFP Cpf1 D fwd
cagcacctggattaccctgttatccctagttttgaggagtgttcagtctccgtgaactcgaaaataataaagggaaaatca

SEQ ID NO: 102 - DNA, 79 bp, Artificial
  GFP Cpf1 C rvs
cgcttcctcctgaaaatgcagctaggtagttttgaccgccccccccataccccaatcgacatgccgaactcagaagtga

SEQ ID NO: 103 - DNA, 79 bp, Artificial
  GFP Cpf1 B rvs
cgcttcctcctgaaaatgcagctaggtagttttgggatgttaagagtccctatcttcgacatgccgaactcagaagtga

SEQ ID NO: 104 - DNA, 51 bp, Artificial
  CAT01 Cpf1 A fwd
tttgggttaaagatggttaaatgattcgacatacacataaagtagcttgcg

SEQ ID NO: 105 - DNA, 51 bp, Artificial
  CAT01 Cpf1 B fwd
tttgggatgttaagagtccctatcttcgacatacacataaagtagcttgcg

SEQ ID NO: 106 - DNA, 53 bp, Artificial
  CAT01 Cpf1 D fwd
tttgaggagtgttcagtctccgtgaactcgacatacacataaagtagcttgcg

SEQ ID NO: 107 - DNA, 49 bp, Artificial
  CAT01 Cpf1 B rvs
tttgggatgttaagagtccctatcttcgactggaaggacaagggggacc

SEQ ID NO: 108 - DNA, 49 bp, Artificial
  CAT01 Cpf1 C rvs
tttgaccgccccccccataccccaatcgactggaaggacaagggggacc

SEQ ID NO: 109 - DNA, 21 bp, Artificial
  Cpf1 guide sequence A
ggttaaagatggttaaatgat

SEQ ID NO: 110 - DNA, 21 bp, Artificial
  Cpf1 guide sequence B
ggatgttaagagtccctatct

SEQ ID NO: 111 - DNA, 21 bp, Artificial
  Cpf1 guide sequence C
accgccccccccataccccaa

SEQ ID NO: 112 - DNA, 23 bp, Artificial
  Cpf1 guide sequence D
aggagtgttcagtctccgtgaac
